United States Patent Application Publication US 2007/0042382 A1 - sequence listing, part 2

SEQ ID NO: 7828 - DNA, 201 bp, Homo sapiens
tctccaagccattgggctgtttgcctccatggctgcggtgctcctaggtggggcccgggcatccaggttgctcttccagaggctcctgtgggatgtggtgygatctcccatcagcttctttgagcggacacccattggtcacctgctaaaccgcttctccaaggagacagacacggttgacgtggacattccagacaaact

SEQ ID NO: 7829 - DNA, 201 bp, Homo sapiens
actgtggccatcctgccactgtttctcctctacgctgggtttcagagcctgtatgtggttagctcatgccagctgagacgcttggagtcagccagctactsgtctgtctgctcccacatggctgagacgttccagggcagcacagtggtccgggcattccgaacccaggccccctttgtggctcagaacaatgctcgcgta

SEQ ID NO: 7830 - DNA, 201 bp, Homo sapiens
ctgtggcctacgtgccccaggaggcctgggtgcagaacacctctgtggtagagaatgtgtgcttcgggcaggagctggacccaccctggctggagagagtwctagaagcctgtgccctgcagccagatgtggacagcttccctgagggaatccacacttcaattggggagcagggcatgaatctctccggaggccagaagc

SEQ ID NO: 7831 - DNA, 201 bp, Homo sapiens; identical to SEQ ID NO: 7782

SEQ ID NO: 7832 - DNA, 201 bp, Homo sapiens
ggtgctgtggcctacgtgccccaggaggcctgggtgcagaacacctctgtggtagagaatgtgtgcttcgggcaggagctggacccaccctggctggagaragtactagaagcctgtgccctgcagccagatgtggacagcttccctgagggaatccacacttcaattggggagcagggcatgaatctctccggaggccag

SEQ ID NO: 7833 - DNA, 201 bp, Homo sapiens
ccggtccctgctgatgtacgcctttggactcctggaggtcagcctggtggtggcagtggctaccccactggccactgtggccatcctgccactgtttctcmtctacgctgggtttcagagcctgtatgtggttagctcatgccagctgagacgcttggagtcagccagctactcgtctgtctgctcccacatggctgagac

SEQ ID NO: 7834 - DNA, 201 bp, Homo sapiens; identical to SEQ ID NO: 7785

SEQ ID NO: 7835 - DNA, 201 bp, Homo sapiens
ccacatcctgccccaggctgattggatcatagtgctggcaaatggggccatcgcagagatgggttcctaccaggagcttctgcagaggaagggggccctcrtgtgtcttctggatcaagccagacagccaggagatagaggagaaggagaaacagaacctgggaccagcaccaaggaccccagaggcacctctgcaggcag

SEQ ID NO: 7836 - DNA, 201 bp, Homo sapiens; identical to SEQ ID NO: 7786

SEQ ID NO: 7837 - DNA, 201 bp, Homo sapiens
gctgtctgctggctgttgtcggtccagtgggggcagggaagtcctccctgctgtccgccctccttggggagctgtcaaaggtggaggggttcgtgagcatygagggtgctgtggcctacgtgccccaggaggcctgggtgcagaacacctctgtggtagagaatgtgtgcttcgggcaggagctggacccaccctggctgg

SEQ ID NO: 7838 - DNA, 201 bp, Homo sapiens; identical to SEQ ID NO: 7787

SEQ ID NO: 7839 - DNA, 201 bp, Homo sapiens; identical to SEQ ID NO: 7788

SEQ ID NO: 7840 - DNA, 201 bp, Homo sapiens; identical to SEQ ID NO: 7789

SEQ ID NO: 7841 - DNA, 201 bp, Homo sapiens; identical to SEQ ID NO: 7791

SEQ ID NO: 7842 - DNA, 201 bp, Homo sapiens; identical to SEQ ID NO: 7794

SEQ ID NO: 7843 - DNA, 201 bp, Homo sapiens; identical to SEQ ID NO: 7795

SEQ ID NO: 7844 - DNA, 201 bp, Homo sapiens; identical to SEQ ID NO: 7796

SEQ ID NO: 7845 - DNA, 201 bp, Homo sapiens; identical to SEQ ID NO: 7797

SEQ ID NO: 7846 - DNA, 201 bp, Homo sapiens; identical to SEQ ID NO: 7798

SEQ ID NO: 7847 - DNA, 201 bp, Homo sapiens; identical to SEQ ID NO: 7799

SEQ ID NO: 7848 - DNA, 201 bp, Homo sapiens; identical to SEQ ID NO: 7800

SEQ ID NO: 7849 - DNA, 201 bp, Homo sapiens; identical to SEQ ID NO: 7822

SEQ ID NO: 7850 - DNA, 201 bp, Homo sapiens; identical to SEQ ID NO: 7824

SEQ ID NO: 7851 - DNA, 201 bp, Homo sapiens; identical to SEQ ID NO: 7802

SEQ ID NO: 7852 - DNA, 201 bp, Homo sapiens; identical to SEQ ID NO: 7803

SEQ ID NO: 7853 - DNA, 201 bp, Homo sapiens; identical to SEQ ID NO: 7827

SEQ ID NO: 7854 - DNA, 201 bp, Homo sapiens; identical to SEQ ID NO: 7830

SEQ ID NO: 7855 - DNA, 163 bp, Homo sapiens; identical to SEQ ID NO: 7808

SEQ ID NO: 7856 - DNA, 201 bp, Homo sapiens; identical to SEQ ID NO: 7832

SEQ ID NO: 7857 - DNA, 201 bp, Homo sapiens
ccacatcctgccccaggctgattggatcatagtgctggcaaatggggccatcgcagagatgggttcctaccaggagcttctgcagaggaagggggccctcrtgtgtcttctggatcaagccagacagccaggagatagaggagaaggaggtactaggtgggctttgctgattctccaggcctggctcctgccacccttggg

SEQ ID NO: 7858 - DNA, 201 bp, Homo sapiens; identical to SEQ ID NO: 7812

SEQ ID NO: 7859 - DNA, 201 bp, Homo sapiens; identical to SEQ ID NO: 7837

SEQ ID NO: 7860 - DNA, 201 bp, Homo sapiens; identical to SEQ ID NO: 7813

SEQ ID NO: 7861 - DNA, 201 bp, Homo sapiens; identical to SEQ ID NO: 7814

SEQ ID NO: 7862 - DNA, 201 bp, Homo sapiens; identical to SEQ ID NO: 7815

SEQ ID NO: 7863 - DNA, 201 bp, Homo sapiens
cacctgcggcccggatatcagccctcaacattgtgggagacctactgcggaaagtcggggcactggagtccaaactcgcttcctgccggaacctcgtgtaygatcagtccccaaaccgaacaggtggcccagcctctgggcggagcagcaagaacagagatggcggggagagacggccaagcagcaccagcgtgcctttgg

SEQ ID NO: 7864 - DNA, 201 bp, Homo sapiens
cttcttcttcgagtcggagagctacaaggacagcgtccagggtagggtgagagggggaccatgaatggcccctgtccctggccccacagactctgagaagsgaagaccatgtctcctcgttggagaaacccaatagcaggggaagctggggggtcaagcaccatcgcaccaacactccaccgcgatctgcctgcgggggat

SEQ ID NO: 7865 - DNA, 201 bp, Homo sapiens
ttagtcaaagcctctagaaggggatcctcgttgaaaggagccctttttactcaaaacacatgggctagtacttgaggtgttcactgattgagaaaataccsgtgaggtatgggactctgataaaaaaaaaaaaaaacacacacacacacaaaaaaaacagaatctgtggcttgaagggaactccgtcacctatgagttggg

SEQ ID NO: 7866 - DNA, 201 bp, Homo sapiens
ttccagagcttccacggtgctggcaaagtcctgcagcttcttcttcgagtcggagagctacaaggacagcgtccagggtagggtgagagggggaccatgartggcccctgtccctggccccacagactctgagaagcgaagaccatgtctcctcgttggagaaacccaatagcaggggaagctggggggtcaagcaccatc

SEQ ID NO: 7867 - DNA, 201 bp, Homo sapiens
atctcctcgtccagctggtcttgcaggctgttccgctcctcctccagctggcgcagcttcgtagacacgttgagcttctgccgggtttcttcttgaagcarctcctgcaaaagggatgcaaagaggtcccagggacctgccccgaggaaggccaccccccaggtcccctggatgatgtggcaggacactcacctgggtgtc

SEQ ID NO: 7868 - DNA, 201 bp, Homo sapiens
tcaaaacacatgggctagtacttgaggtgttcactgattgagaaaatacccgtgaggtatgggactctgataaaaaaaaaaaaaaacacacacacacacamaaaaaacagaatctgtggcttgaagggaactccgtcacctatgagttgggaccctggccctagactctgtggttctaagaacttatttgagccccaatgg

SEQ ID NO: 7869 - DNA, 201 bp, Homo sapiens
gagagggggaccatgaatggcccctgtccctggccccacagactctgagaagcgaagaccatgtctcctcgttggagaaacccaatagcaggggaagctgrggggtcaagcaccatcgcaccaacactccaccgcgatctgcctgcgggggatctcagcgcagagaagttgagaggacccatgaaggaagcaaggacacgg

SEQ ID NO: 7870 - DNA, 201 bp, Homo sapiens
tgattgagaaaatacccgtgaggtatgggactctgataaaaaaaaaaaaaaacacacacacacacaaaaaaaacagaatctgtggcttgaagggaactccrtcacctatgagttgggaccctggccctagactctgtggttctaagaacttatttgagccccaatggtattgactgggacctgatcccactaaatggatcc

SEQ ID NO: 7871 - DNA, 201 bp, Homo sapiens
cccagggacctgccccgaggaaggccaccccccaggtcccctggatgatgtggcaggacactcacctgggtgtcctggagctgggaactgagggacgccaygtccttggccagcttaatggccttcccctcggcctcgttaagcatccctgtgacgctctcaacttcattctaagggtgccaagagactggttagtcaaag

SEQ ID NO: 7872 - DNA, 201 bp, Homo sapiens
ataaggggttggacacgagttgccgctggttgtccaaatcaacaaccaggtcgtccagctcctgctgaagcctgttcttggtcttttccagtttatcatamgcggccgccttctcctcgtactgctgggtgaggttctcgatctccttctggaacctcttcttcccctcttccagagcttccacggtgctggcaaagtcct

SEQ ID NO: 7873 - DNA, 201 bp, Homo sapiens
cgcccattgctcaccgaggacccagctcaagtttaaacacacctgggagcttcagacgtggcctggacgactccaccggggggacccccctcacacctgcrgcccggatatcagccctcaacattgtgggagacctactgcggaaagtcggggcactggagtccaaactcgcttcctgccggaacctcgtgtacgatcagt

SEQ ID NO: 7874 - DNA, 201 bp, Homo sapiens; identical to SEQ ID NO: 7864

SEQ ID NO: 7875 - DNA, 201 bp, Homo sapiens; identical to SEQ ID NO: 7865

SEQ ID NO: 7876 - DNA, 201 bp, Homo sapiens; identical to SEQ ID NO: 7866

SEQ ID NO: 7877 - DNA, 201 bp, Homo sapiens; identical to SEQ ID NO: 7867

SEQ ID NO: 7878 - DNA, 201 bp, Homo sapiens; identical to SEQ ID NO: 7868

SEQ ID NO: 7879 - DNA, 201 bp, Homo sapiens; identical to SEQ ID NO: 7870

SEQ ID NO: 7880 - DNA, 201 bp, Homo sapiens; identical to SEQ ID NO: 7869

SEQ ID NO: 7881 - DNA, 201 bp, Homo sapiens; identical to SEQ ID NO: 7871

SEQ ID NO: 7882 - DNA, 201 bp, Homo sapiens
agtcggggttggacacgagttgccgctggttgtccaaatcaacaaccaggtcgtccagctcctgctgaagcctgttcttggtcttttccagtttatcatamgcggccgccttctcctcgtactgctgggtgaggttctcgatctccttctggaacctcttcttcccctcttccagagcttccacggtgctggcaaagtcct

SEQ ID NO: 7883 - DNA, 201 bp, Homo sapiens
cgcccattgctcaccgaggacccagctcaagtttaaacacacctgggagcttcagacgtggcctggacgactccaccggggggacccccctcacacctgcrgcccggatatcagccctcaacattgtgggagacctactgcggaaagtcggggttggacacgagttgccgctggttgtccaaatcaacaaccaggtcgtcc

SEQ ID NO: 7884 - DNA, 201 bp, Homo sapiens; identical to SEQ ID NO: 7863

SEQ ID NO: 7885 - DNA, 201 bp, Homo sapiens; identical to SEQ ID NO: 7864

SEQ ID NO: 7886 - DNA, 201 bp, Homo sapiens; identical to SEQ ID NO: 7865

SEQ ID NO: 7887 - DNA, 201 bp, Homo sapiens; identical to SEQ ID NO: 7866

SEQ ID NO: 7888 - DNA, 201 bp, Homo sapiens; identical to SEQ ID NO: 7867

SEQ ID NO: 7889 - DNA, 201 bp, Homo sapiens; identical to SEQ ID NO: 7868

SEQ ID NO: 7890 - DNA, 201 bp, Homo sapiens; identical to SEQ ID NO: 7869

SEQ ID NO: 7891 - DNA, 201 bp, Homo sapiens; identical to SEQ ID NO: 7870

SEQ ID NO: 7892 - DNA, 201 bp, Homo sapiens; identical to SEQ ID NO: 7871

SEQ ID NO: 7893 - DNA, 201 bp, Homo sapiens; identical to SEQ ID NO: 7872

SEQ ID NO: 7894 - DNA, 201 bp, Homo sapiens; identical to SEQ ID NO: 7873

SEQ ID NO: 7895 - DNA, 201 bp, Homo sapiens
actcaagcccacaggaagtaaggtacgtgtctccaaagtgtactggaccgaaaatgtgactgagcacagagaagtggccatccgctgcagcctggagagtrtaggcagctcagccactctgtactctgtgatgtggtactggaacagagaaaactctggaagtaaattgctggtgcacttgcaacatgatggcttgctgga

SEQ ID NO: 7896 - DNA, 201 bp, Homo sapiens
aatggcactattgaatgggggaatttcctatcccggttccaaaagaagacgaaagtgtcgcagtctttatttcgttcacaactcctagtccatgatgccastgaggaagagacaggagtgtatcagtgtgaagtagaagtttatgacagaaattccctatacaacaaccgccccccgagggcttctgccatctctcaccca

SEQ ID NO: 7897 - DNA, 201 bp, Homo sapiens
gcagtctttatttcgttcacaactcctagtccatgatgccactgaggaagagacaggagtgtatcagtgtgaagtagaagtttatgacagaaattccctakacaacaaccgccccccgagggcttctgccatctctcacccactgaggatagccgtcactttaccagagagcaagctaaaagtgaattcaaggagtcaagt

SEQ ID NO: 7898 - DNA, 201 bp, Homo sapiens
ctgtaaagtctctggagtcaagtttacaagttagtctgatgagccgtcagccgcaggtgatgttaaccaacacctttgacctgtcctgtgtcgtgagggcyggttactctgacctcaaggtgccactcactgtgacgtggcagttccagccagctagctctcacatattccaccagcttattcgaatcacccacaatggca

SEQ ID NO: 7899 - DNA, 201 bp, Homo sapiens
aggctggagaaaatggactgggccaccttccagctggagatcaccttcactgccatcacagacagtggcacatatgagtgcagagtatctgagaagtctcrgaaccaggccagagatctgagctggactcagaagatttcagttactgtaaagtctctggagtcaagtttacaagttagtctgatgagccgtcagccgcag

SEQ ID NO: 7900 - DNA, 201 bp, Homo sapiens
attgatgctggtggagtcctgggcctgaagaatgactacaaagagagagcaagtcaaggagagctccaggtttcaaagttaggccccaaggctttctctcycaagatcttctctctgggcccagaggatgaaggcgcctacagatgtgtggtagcagaggtcatgaaaacacgcacaggttcctggcaggtgcttcagaga

SEQ ID NO: 7901 - DNA, 201 bp, Homo sapiens
ttctccttctgactaagctcagcattggccagagagaagtaacagttcagaaaggaccactgtttagagctgaaggttacccagtcagcattggctgcaaygtaactggccaccagggaccttctgagcagcatttccagtggtctgtttacctgccgacaaacccgacccaggaagtccagatcattagcaccaaggatg

SEQ ID NO: 7902 - DNA, 201 bp, Homo sapiens
acctggtacctaacacaggatggaggaggaagccaagccactgagattatttctctctccaaagattttatattggtccctgggcccttgtatacagagcrgtttgcagccagtgacgtacagctcaacaaactgggacccactacattcaggctgtccatagagaggctccagtcctcagatcagggtcagctgttctgt

SEQ ID NO: 7903 - DNA, 201 bp, Homo sapiens
cctgttcatctgtcccttcgtcctgctcctccttctgctcatctccctcctctgcttatactggaaggccaggaagttgtcaacactgcgttccaacacayggaaagaaaaagctctctgggtggacttgaaagaggctggaggtgtgaccacaaataggagggaagacgaggaggaagatgaaggcaactgaatcccaag

SEQ ID NO: 7904 - DNA, 201 bp, Homo sapiens
tctcggtaaggaggaaggtgagccattagccctcacctgtgaggcatccaaagccacagcccaacatactcacctctctgtcacctggtacctaacacagratggaggaggaagccaagccactgagattatttctctctccaaagattttatattggtccctgggcccttgtatacagagcggtttgcagccagtgacgt

SEQ ID NO: 7905 - DNA, 201 bp, Homo sapiens
accaaacactgatgagaaatactatggaagttacagtgcaaagactaatctaattgttattccagataccctctctgccaccatgagttctcagactctcrgtaaggaggaaggtgagccattagccctcacctgtgaggcatccaaagccacagcccaacatactcacctctctgtcacctggtacctaacacaggatgg

SEQ ID NO: 7906 - DNA, 201 bp, Homo sapiens
ctgacagaccccggcaacttctagatgaacccaagtgaactttcctcattaccatcctgaagtcactaccccagggggagctatagcttcatgaccgtaamatgtgacctgtgtgctggcaggacgactcactgcggctgcgccactgggacccctcccctacatgcaccaatgcactctctcccctctccatcaccccat

SEQ ID NO: 7907 - DNA, 201 bp, Homo sapiens
ggactaacagaattgaaactcaagcccacaggaagtaaggtacgtgtctccaaagtgtactggaccgaaaatgtgactgagcacagagaagtggccatccrctgcagcctggagagtgtaggcagctcagccactctgtactctgtgatgtggtactggaacagagaaaactctggaagtaaattgctggtgcacttgcaa

SEQ ID NO: 7908 - DNA, 201 bp, Homo sapiens
ggaagccaagccactgagattatttctctctccaaagattttatattggtccctgggcccttgtatacagagcggtttgcagccagtgacgtacagctcarcaaactgggacccactacattcaggctgtccatagagaggctccagtcctcagatcagggtcagctgttctgtgaggcaacggaatggattcaggatcca

SEQ ID NO: 7909 - DNA, 201 bp, Homo sapiens
ggtcatgaaaacacgcacaggttcctggcaggtgcttcagagaaagcagtcaccagacagccacgtgcacctgaggaagccagcagcaagaagtgtggtcrtgtctaccaagaacaagcagcaagttgtgtgggaaggagagacactcgcctttctctgtaaggctggtggagctgaaagtcccctgtctgtgagctggtg

SEQ ID NO: 7910 - DNA, 201 bp, Homo sapiens
ggaaccaggccagagatctgagctggactcagaagatttcagttactgtaaagtctctggagtcaagtttacaagttagtctgatgagccgtcagccgcargtgatgttaaccaacacctttgacctgtcctgtgtcgtgagggccggttactctgacctcaaggtgccactcactgtgacgtggcagttccagccagcta

SEQ ID NO: 7911 - DNA, 201 bp, Homo sapiens
agtggattaatcaagcatccgatgagtcacagcggatggtgctcacggtgctgccttcagagcccacgcttccttccaggatctgctcctcggccccttthctctatttcctgttcatctgtcccttcgtcctgctcctccttctgctcatctccctcctctgcttatactggaaggccaggaagttgtcaacactgcgtt

SEQ ID NO: 7912 - DNA, 201 bp, Homo sapiens
ccaacacctttgacctgtcctgtgtcgtgagggccggttactctgacctcaaggtgccactcactgtgacgtggcagttccagccagctagctctcacatmttccaccagcttattcgaatcacccacaatggcactattgaatgggggaatttcctatcccggttccaaaagaagacgaaagtgtcgcagtctttatttc

SEQ ID NO: 7913 - DNA, 201 bp, Homo sapiens
cggcccctttactctatttcctgttcatctgtcccttcgtcctgctcctccttctgctcatctccctcctctgcttatactggaaggccaggaagttgtcracactgcgttccaacacacggaaagaaaaagctctctgggtggacttgaaagaggctggaggtgtgaccacaaataggagggaagacgaggaggaagatg

SEQ ID NO: 7914 - DNA, 201 bp, Homo sapiens
ccaccttccagctggagatcaccttcactgccatcacagacagtggcacatatgagtgcagagtatctgagaagtctcggaaccaggccagagatctgagstggactcagaagatttcagttactgtaaagtctctggagtcaagtttacaagttagtctgatgagccgtcagccgcaggtgatgttaaccaacacctttg

SEQ ID NO: 7915 - DNA, 201 bp, Homo sapiens; identical to SEQ ID NO: 7895

SEQ ID NO: 7916 - DNA, 201 bp, Homo sapiens; identical to SEQ ID NO: 7896

SEQ ID NO: 7917 - DNA, 201 bp, Homo sapiens; identical to SEQ ID NO: 7897

SEQ ID NO: 7918 - DNA, 201 bp, Homo sapiens; identical to SEQ ID NO: 7898

SEQ ID NO: 7919 - DNA, 201 bp, Homo sapiens; identical to SEQ ID NO: 7899

SEQ ID NO: 7920 - DNA, 201 bp, Homo sapiens; identical to SEQ ID NO: 7900

SEQ ID NO: 7921 - DNA, 201 bp, Homo sapiens; identical to SEQ ID NO: 7901

SEQ ID NO: 7922 - DNA, 201 bp, Homo sapiens; identical to SEQ ID NO: 7902

SEQ ID NO: 7923 - DNA, 201 bp, Homo sapiens; identical to SEQ ID NO: 7903

SEQ ID NO: 7924 - DNA, 201 bp, Homo sapiens; identical to SEQ ID NO: 7904

SEQ ID NO: 7925 - DNA, 201 bp, Homo sapiens; identical to SEQ ID NO: 7905

SEQ ID NO: 7926 - DNA, 177 bp, Homo sapiens
ctgacagaccccggcaacttctagatgaacccaagtgaactttcctcattaccatcctgaagtcactaccccagggggagctatagcttcatgaccgtaamatgtgacctgtgtgctggcaggacgactcactgcggctgcgccactgggacccctcccctacatgcaccaatgcac

SEQ ID NO: 7927 - DNA, 201 bp, Homo sapiens; identical to SEQ ID NO: 7907

SEQ ID NO: 7928 - DNA, 201 bp, Homo sapiens; identical to SEQ ID NO: 7908

SEQ ID NO: 7929 - DNA, 201 bp, Homo sapiens; identical to SEQ ID NO: 7909

SEQ ID NO: 7930 - DNA, 201 bp, Homo sapiens; identical to SEQ ID NO: 7910

SEQ ID NO: 7931 - DNA, 201 bp, Homo sapiens; identical to SEQ ID NO: 7911

SEQ ID NO: 7932 - DNA, 201 bp, Homo sapiens; identical to SEQ ID NO: 7912

SEQ ID NO: 7933 - DNA, 201 bp, Homo sapiens; identical to SEQ ID NO: 7913

SEQ ID NO: 7934 - DNA, 201 bp, Homo sapiens; identical to SEQ ID NO: 7914

SEQ ID NO: 7935 - DNA, 201 bp, Homo sapiens
agcaatcttctccctcggtctcggggagtcgctgtacatcctggtggggcagcagggagaggacgcctgtcccggagtgagcgcagccagtggggatgggscggcgccggcgccgggggcgagggctgcctgggggccgggggagcgtgctttcctcggtgccgggtcaccagcacagcgaggggaggctcccgggccccg

SEQ ID NO: 7936 - DNA, 179 bp, Homo sapiens
aggtgggcgtggccagaccagctttaggtccggggagtgtctcgccagcggcagcacacccctgtaagtggtggccagrgctgccgtggcaaaatgagctgtcaactttaggttgacaggggtgtggccgcgaccgcaagggcttttgttgccgggtggacccaacagggatgggctgc

SEQ ID NO: 7937 - DNA, 201 bp, Homo sapiens
gtgtggttcggagccgcgggcgccattctctgctctagcccggggtcccaggagacttttctgcggtcctcgcccctgccgctggcaagtcccagcccccrggacccgaaagtcagcgccccgcctagtatcttggagccagcctccccgctgaattctccgggcaccgaggggtcttggctgttttctacctgcggggcc

SEQ ID NO: 7938 - DNA, 201 bp, Homo sapiens
gcttcctggaacacgccgctggccccacaggtgcgcgctggcgagctggaaccgttgctggtggcggccggaggcggcggtcgggcctacctgaggccgcrggaccgaggccggactcaggcctcccccgagaaactggagaaccgctcggaggcgcccgggagcggcgggagaggcggggcggcaggtggtgggggcggc

SEQ ID NO: 7939 - DNA, 201 bp, Homo sapiens
gggcgggagccctctcccagtggcagtgcccctggacagctggagggcgcttcctggaacacgccgctggccccacaggtgcgcgctggcgagctggaacygttgctggtggcggccggaggcggcggtcgggcctacctgaggccgcgggaccgaggccggactcaggcctcccccgagaaactggagaaccgctcggag

SEQ ID NO: 7940 - DNA, 201 bp, Homo sapiens
cacgcggcgatggatgggagcgaaggggtcccggggccccctgggcgggagccctctcccagtggcagtgcccctggacagctggagggcgcttcctggamcacgccgctggccccacaggtgcgcgctggcgagctggaaccgttgctggtggcggccggaggcggcggtcgggcctacctgaggccgcgggaccgaggc

SEQ ID NO: 7941 - DNA, 201 bp, Homo sapiens
tgtcaccgaggtttccccagccaatgttactctgctcagagccctgggccatggtgcctttggggaggtgtatgagggactggtaattggccttcctgggractccagtcccctgcaggtagctatcaagaccctgccagaactctgctcgcctcaggatgagctggatttcctcatggaggccctcatcatcagcaagtt

SEQ ID NO: 7942 - DNA, 179 bp, Homo sapiens; identical to SEQ ID NO: 7936

SEQ ID NO: 7943 - DNA, 165 bp, Homo sapiens
gggcccagccacttccagcttttgatcttggggccagaggccgccttacacacaccccaggtgtccatggggagcactggattgctctcccattatgagcrtccttcatctgggcagaccccccaccctgcagatgcttctaataaaaagctcttctcatcctcc

SEQ ID NO: 7944 - DNA, 201 bp, Homo sapiens
gccagttattaccgcaggggggaccgggccttgctcccagtcaagtggatgcccccagaggccttcctggagggcatcttcacatccaagacagattcctrgtcttttggggtgctgctctgggagatcttctcactgggctacatgccctatcctgggcgcaccaaccaggaggtgctggacttcgtcgttggaggaggc

SEQ ID NO: 7945 - DNA, 201 bp, Homo sapiens; identical to SEQ ID NO: 7937

SEQ ID NO: 7946 - DNA, 201 bp, Homo sapiens
gtggcaacctcaacactgagcctccttatggtgtgtggggtcctgattctgggtacgaagcgtctagcaggcacagttgattcaaggctgctcctctccartgagctgggatgggtttctgcggggtcccggggctgacttcaagaccactcaccgcagcagagccgtggtagactcctctgggattctaagataggaagg

SEQ ID NO: 7947 - DNA, 201 bp, Homo sapiens
gcttcctggaacacgccgctggccccacaggtgcgcgctggcgagctggaaccgttgctggtggcggccggaggcggcggtcgggcctacctgaggccgcrggaccgaggccggactcaggcctcccccgagaaactggagaaccgctcggaggcgcccgggagcggcgggagaggcggggcggcagggggcgacgcttca

SEQ ID NO: 7948 - DNA, 201 bp, Homo sapiens; identical to SEQ ID NO: 7939

SEQ ID NO: 7949 - DNA, 201 bp, Homo sapiens; identical to SEQ ID NO: 7941

SEQ ID NO: 7950 - DNA, 201 bp, Homo sapiens
cctgggctgggctgggggcccctgcccttatccaggccccctgggcgggagccctctcccagtggcagtgcccctggacagctggagggcgcttcctggamcacgccgctggccccacaggtgcgcgctggcgagctggaaccgttgctggtggcggccggaggcggcggtcgggcctacctgaggccgcgggaccgaggc

SEQ ID NO: 7951 - DNA, 112 bp, Homo sapiens
gtggtggccagrgctgccgtggcaaaatgagctgtcaactttaggttgacaggggtgtggccgcgaccgcaagggcttttgttgccgggtggacccaacagggatgggctgc

SEQ ID NO: 7952 - DNA, 201 bp, Homo sapiens; identical to SEQ ID NO: 7944

SEQ ID NO: 7953 - DNA, 165 bp, Homo sapiens; identical to SEQ ID NO: 7943

SEQ ID NO: 7954 - DNA, 201 bp, Homo sapiens
gtacgtgctcccttcggcgctcagcgttggggtcccaatcctctccccaggggcgctcacgcaccggctctccgtccgtcccttggggtccccctatcccygcgctgggctgggctggcctgggctgggctgggggcccctgcccttatccaggccccctgggcgggagccctctcccagtggcagtgcccctggacagct

SEQ ID NO: 7955 - DNA, 201 bp, Homo sapiens
ggtacgtgctcccttcggcgctcagcgttggggtcccaatcctctccccaggggcgctcacgcaccggctctccgtccgtcccttggggtccccctatccytgcgctgggctgggctggcctgggctgggctgggggcccctgcccttatccaggccccctgggcgggagccctctcccagtggcagtgcccctggacagc

SEQ ID NO: 7956 - DNA, 201 bp, Homo sapiens; identical to SEQ ID NO: 7946

SEQ ID NO: 7957 - DNA, 201 bp, Homo sapiens; identical to SEQ ID NO: 7938

SEQ ID NO: 7958 - DNA, 201 bp, Homo sapiens; identical to SEQ ID NO: 7939

SEQ ID NO: 7959 - DNA, 201 bp, Homo sapiens; identical to SEQ ID NO: 7941

SEQ ID NO: 7960 - DNA, 201 bp, Homo sapiens; identical to SEQ ID NO: 7940

SEQ ID NO: 7961 - DNA, 179 bp, Homo sapiens; identical to SEQ ID NO: 7936

SEQ ID NO: 7962 - DNA, 201 bp, Homo sapiens; identical to SEQ ID NO: 7944

SEQ ID NO: 7963 - DNA, 165 bp, Homo sapiens; identical to SEQ ID NO: 7943

SEQ ID NO: 7964 - DNA, 201 bp, Homo sapiens; identical to SEQ ID NO: 7937

SEQ ID NO: 7965 - DNA, 201 bp, Homo sapiens
ggtggcaacctcaacactgagcctccttatggtgtgtggggtcctgattctgggtacgaagcgtctagcaggcacagttgattcaaggctgctcctctccrtgaagcagaagaagtggcagggcctgcaggagatgaggctgccgagccctgagcttgagctgagcaagcttcgaacctctgccatcaggacagcccccaa

SEQ ID NO: 7966 - DNA, 201 bp, Homo sapiens; identical to SEQ ID NO: 7947

SEQ ID NO: 7967 - DNA, 201 bp, Homo sapiens; identical to SEQ ID NO: 7939

SEQ ID NO: 7968 - DNA, 201 bp, Homo sapiens; identical to SEQ ID NO: 7941

SEQ ID NO: 7969 - DNA, 201 bp, Homo sapiens; identical to SEQ ID NO: 7950

SEQ ID NO: 7970 - DNA, 112 bp, Homo sapiens; identical to SEQ ID NO: 7951

SEQ ID NO: 7971 - DNA, 201 bp, Homo sapiens; identical to SEQ ID NO: 7944

SEQ ID NO: 7972 - DNA, 165 bp, Homo sapiens; identical to SEQ ID NO: 7943

SEQ ID NO: 7973 - DNA, 201 bp, Homo sapiens; identical to SEQ ID NO: 7954

SEQ ID NO: 7974 - DNA, 201 bp, Homo sapiens; identical to SEQ ID NO: 7955

SEQ ID NO: 7975 - DNA, 201 bp, Homo sapiens; identical to SEQ ID NO: 7965

SEQ ID NO: 7976 - DNA, 201 bp, Homo sapiens
ggtggcgggggcgccacctacgttttccgggtgcgcgctggcgagctggaaccgttgctggtggcggccggaggcggcggtcgggcctacctgaggccgcrggaccgaggccggactcaggcctcccccgagaaactggagaaccgctcggaggcgcccgggagcggcgggagaggcggggcggcaggtggtgggggcggc

SEQ ID NO: 7977 - DNA, 201 bp, Homo sapiens
gggagcgaaggggtcccggggtcgcggcgctgggcgggaggtggcgggggtggcgggggcgccacctacgttttccgggtgcgcgctggcgagctggaacygttgctggtggcggccggaggcggcggtcgggcctacctgaggccgcgggaccgaggccggactcaggcctcccccgagaaactggagaaccgctcggag

SEQ ID NO: 7978 - DNA, 201 bp, Homo sapiens; identical to SEQ ID NO: 7941

SEQ ID NO: 7979 - DNA, 179 bp, Homo sapiens; identical to SEQ ID NO: 7936

SEQ ID NO: 7980 - DNA, 201 bp, Homo sapiens; identical to SEQ ID NO: 7937

SEQ ID NO: 7981 - DNA, 201 bp, Homo sapiens; identical to SEQ ID NO: 7944

SEQ ID NO: 7982 - DNA, 165 bp, Homo sapiens; identical to SEQ ID NO: 7943

SEQ ID NO: 7983 - DNA, 201 bp, Homo sapiens
ggtggcgggggcgccacctacgttttccgggtgcgcgctggcgagctggaaccgttgctggtggcggccggaggcggcggtcgggcctacctgaggccgcrggaccgaggccggactcaggcctcccccgagaaactggagaaccgctcggaggcgcccgggagcggcgggagaggcggggcggcagggggcgacgcttca

SEQ ID NO: 7984 - DNA, 201 bp, Homo sapiens; identical to SEQ ID NO: 7977

SEQ ID NO: 7985 - DNA, 201 bp, Homo sapiens; identical to SEQ ID NO: 7941

SEQ ID NO: 7986 - DNA, 179 bp, Homo sapiens; identical to SEQ ID NO: 7936

SEQ ID NO: 7987 - DNA, 201 bp, Homo sapiens; identical to SEQ ID NO: 7937

SEQ ID NO: 7988 - DNA, 201 bp, Homo sapiens; identical to SEQ ID NO: 7944

SEQ ID NO: 7989 - DNA, 165 bp, Homo sapiens; identical to SEQ ID NO: 7943

SEQ ID NO: 7990 - DNA, 201 bp, Homo sapiens
ggcaagagctgagaaggaagcgctgatcttctatttaattccccacccatgacccccagaaagcaggagggcattgcccacattcacagggctcttcagtmtcagaatcaggacactggccaggtgtctggtttgggtccagagtgctcatcatcatgtcatagaactgctgggcccaggtctcctgaaatgggaagccca

SEQ ID NO: 7991 - DNA, 201 bp, Homo sapiens
tttgggagtgagacatcttcttgctgctggatttccaagctgagaggacgtgaacctgggaccaccagtagccatcttgtttgccacatggagagagactrtgaggacagaagccaaactggaagtggaggagccaagggattgacaaacaacagagccttgaccacgtggagtctctgaatcagccttgtctggaaccag

SEQ ID NO: 7992 - DNA, 201 bp, Homo sapiens
ttcatccccgcattcccaatatacccaggccacaagagtggacgtgaaccacagggtgtcctgtcagaggagcccatctcccatctccccagctccctatytggaggatagttggatagttacgtgttcctagcaggaccaactacagtcttcccaaggattgagttatggactttgggagtgagacatcttcttgctgct

SEQ ID NO: 7993 - DNA, 201 bp, Homo sapiens
agaagctgttgtgtttcttggtcttgaccagcctctctcatgcttttggccagacagacatgtcgaggaaggcttttgtgtttcccaaagagtcggatacktcctatgtatccctcaaagcaccgttaacgaagcctctcaaagccttcactgtgtgcctccacttctacacggaactgtcctcgacccgtgggtacagta

SEQ ID NO: 7994 - DNA, 201 bp, Homo sapiens
ggctgtgaattctttcttcatccccgcattcccaatatacccaggccacaagagtggacgtgaaccacagggtgtcctgtcagaggagcccatctcccatytccccagctccctatctggaggatagttggatagttacgtgttcctagcaggaccaactacagtcttcccaaggattgagttatggactttgggagtgag

SEQ ID NO: 7995 - DNA, 150 bp, Homo sapiens
caaactcccttactgctttggatataaatccaggcaggaggaggtagctytaaggcaagagatctaggacttctagcccctgaactttcagccgaatacatcttttccaaaggagtgaattcaggcccttgtatcactggcagcaggacg

SEQ ID NO: 7996 - DNA, 201 bp, Homo sapiens
gcccagctgtgggtcctgaaggtacctcccggttttttacaccgcatgggccccacgtctctgtctctggtacctcccgcttttttacactgcatggttcycacgtctctgtctctgggcctttgttcccctatatgcattgcaggcctgctccaccctcctcagcgcctgagaatggaggtaaagtgtctggtctgggag

SEQ ID NO: 7997 - DNA, 201 bp, Homo sapiens
ctgggcctttgttcccctatatgcattgcaggcctgctccaccctcctcagcgcctgagaatggaggtaaagtgtctggtctgggagctcgttaactatgmtgggaaatggtccaaaagaatcagaatttgaggtgttttgttttcatttttatttcaagttggacagatcttggagataatttcttacctcacatagatg

SEQ ID NO: 7998 - DNA, 201 bp, Homo sapiens
ctccctatctggaggatagttggatagttacgtgttcctagcaggaccaactacagtcttcccaaggattgagttatggactttgggagtgagacatcttyttgctgctggatttccaagctgagaggacgtgaacctgggaccaccagtagccatcttgtttgccacatggagagagactgtgaggacagaagccaaact

SEQ ID NO: 7999 - DNA, 201 bp, Homo sapiens
tcatcttggggcaggagcaggattccttcggtgggaactttgaaggaagccagtccctggtgggagacattggaaatgtgaacatgtgggactttgtgctstcaccagatgagattaacaccatctatcttggcgggcccttcagtcctaatgtcctgaactggcgggcactgaagtatgaagtgcaaggcgaagtgttca

SEQ ID NO: 8000 - DNA, 201 bp, Homo sapiens
ttgttcccctatatgcattgcaggcctgctccaccctcctcagcgcctgagaatggaggtaaagtgtctggtctgggagctcgttaactatgctgggaaayggtccaaaagaatcagaatttgaggtgttttgttttcatttttatttcaagttggacagatcttggagataatttcttacctcacatagatgagaaaact

SEQ ID NO: 8001 - DNA, 201 bp, Homo sapiens; identical to SEQ ID NO: 7990

SEQ ID NO: 8002 - DNA, 201 bp, Homo sapiens
cccaaggattgagttatggactttgggagtgagacatcttcttgctgacgtgaacctgggaccaccagtagccatcttgtttgccacatggagagagactrtgaggacagaagccaaactggaagtggaggagccaagggattgacaaacaacagagccttgaccacgtggagtctctgaatcagccttgtctggaaccag

SEQ ID NO: 8003 - DNA, 201 bp, Homo sapiens
ttcatccccgcattcccaatatacccaggccacaagagtggacgtgaaccacagggtgtcctgtcagaggagcccatctcccatctccccagctccctatytggaggatagttggatagttacgtgttcctagcaggaccaactacagtcttcccaaggattgagttatggactttgggagtgagacatcttcttgctgac

SEQ ID NO: 8004 - DNA, 201 bp, Homo sapiens; identical to SEQ ID NO: 7993

SEQ ID NO: 8005 - DNA, 201 bp, Homo sapiens; identical to SEQ ID NO: 7994

SEQ ID NO: 8006 - DNA, 150 bp, Homo sapiens; identical to SEQ ID NO: 7995

SEQ ID NO: 8007 - DNA, 201 bp, Homo sapiens; identical to SEQ ID NO: 7996

SEQ ID NO: 8008 - DNA, 201 bp, Homo sapiens; identical to SEQ ID NO: 7997

SEQ ID NO: 8009 - DNA, 201 bp, Homo sapiens
ctccctatctggaggatagttggatagttacgtgttcctagcaggaccaactacagtcttcccaaggattgagttatggactttgggagtgagacatcttyttgctgacgtgaacctgggaccaccagtagccatcttgtttgccacatggagagagactgtgaggacagaagccaaactggaagtggaggagccaaggga

SEQ ID NO: 8010 - DNA, 201 bp, Homo sapiens; identical to SEQ ID NO: 7999

SEQ ID NO: 8011 - DNA, 201 bp, Homo sapiens; identical to SEQ ID NO: 8000

SEQ ID NO: 8012 - DNA, 134 bp, Homo sapiens
tttgggagtgagacatcttcttgctgctggatttccaagctgagaggacgtgaacctgggaccaccagtagccatcttgtttgccacatggagagagactrtgaggacagaagccaaactggaagtggaggagc

SEQ ID NO: 8013 - DNA, 201 bp, Homo sapiens; identical to SEQ ID NO: 7992

SEQ ID NO: 8014 - DNA, 201 bp, Homo sapiens
agaagctgttgtgtttcttggtcttgaccagcctctctcatgcttttggccagacagacatgtcgaggaaggcttttgtgtttcccaaagagtcggatacktcctatgtatccctcaaagcaccgttaacgaagcctctcaaagccttcactgtgtgcctccacttctacacggaactgtcctcgacccgtggtcctaatg

SEQ ID NO: 8015 - DNA, 201 bp, Homo sapiens; identical to SEQ ID NO: 7998

SEQ ID NO: 8016 - DNA, 201 bp, Homo sapiens; identical to SEQ ID NO: 7994

SEQ ID NO: 8017 - DNA, 150 bp, Homo sapiens; identical to SEQ ID NO: 7995

SEQ ID NO: 8018 - DNA, 21 bp, Homo sapiens
gtatataaaatagtcttactk

SEQ ID NO: 8019 - DNA, 201 bp, Homo sapiens
aaagagatcaaaacagagacactgactttgggctaaaggactttttgcaaaataatgctttgttggagtttaaaaattcagggaaaaaatcggcagaccaytagttactatggatttattttttttcctttcaaacacggtaaggaaacaatctattacttttttccttaaaaggagaatttatagcactgtaatacagct

SEQ ID NO: 8020 - DNA, 201 bp, Homo sapiens
gcagaccattagttactatggatttattttttttcctttcaaacacggtaaggaaacaatctattacttttttccttaaaaggagaatttatagcactgtyatacagcttaaaatatttttagaatgatgtaaatagttaaccttcagtagtctattaaggcattaatacttctctggacatgcgcgtttgagggtggagg

SEQ ID NO: 8021 - DNA, 201 bp, Homo sapiens
tgaaggaagagcatgttggagcttaggaaatgcatacacagcactaggaaatcatgatcaagcaatgcattttgctgaaaagcacttggaaatttcaagaraggttggggataaaagtggtgaactaacagcacgacttaatctctcagaccttcaaatggttcttggtctgagctacagcacaaataactccataatgtc

SEQ ID NO: 8022 - DNA, 201 bp, Homo sapiens
gcaataggatggatgatcagagatgttgcttacaagaaaagaactgccatacagcttcaacaacaacttcttccactccccctaaaatgatgctaaaaacytcatctgttcctgtggtatcccccaacacggatgagtttttagatcttcttgccagctcacagagtcgccgtctggatgaccagagggctagtttcagta

SEQ ID NO: 8023 - DNA, 201 bp, Homo sapiens
tcaagactatgaaaaggccattgattatcatctgaagcacttagcaattgctcaagagctgaatgatagaattggtgaaggaagagcatgttggagcttargaaatgcatacacagcactaggaaatcatgatcaagcaatgcattttgctgaaaagcacttggaaatttcaagagaggttggggataaaagtggtgaact

SEQ ID NO: 8024 - DNA, 168 bp, Homo sapiens
aagtgaatcatagattagaatttaatactcttatggaaataattttttaacatcttaattgacaatggcgtttttttatacataaccatggatgtagtggraaacaatgttgtttggtaaaaataatgtacttgatcaatgtaaaaaagtatataaaatagtcttact

SEQ ID NO: 8025 - DNA, 128 bp, Homo sapiens
aattttttaacatcttaattgacaatggcgtttttttatacataaccatggatgtagtgggaaacaatgttgtttggtaaaaataatgtacttgatcaatytaaaaaagtatataaaatagtcttact

SEQ ID NO: 8026 - DNA, 201 bp, Homo sapiens
cagaagaagtgagagatgctctgcaggcagccgtggatttttatgaggaaaacctatcattagtgactgctttgggtgaccgagcggcacaaggacgtgcrtttggaaatcttggaaacacacattacctccttggcaacttcagggatgcagttatagctcatgagcagcgtctccttattgcaaaagaatttggagata

SEQ ID NO: 8027 - DNA, 198 bp, Homo sapiens
ctttacctagtgtttataaagtaggaagttaagtgaatcatagattagaatttaatactcttatggaaataattttttaacatcttaattgacaatggcgkttttttatacataaccatggatgtagtgggaaacaatgttgtttggtaaaaataatgtacttgatcaatgtaaaaaagtatataaaatagtcttact

SEQ ID NO: 8028 - DNA, 201 bp, Homo sapiens
ctaacacaaaacagccagtcggtacttagccacctgatgactaatgacaacaaagaggctgatgaagatttctttgacatccttgtaaaatgtcaaggatycagattagatgatcaaagatgtgctccaccacctgctaccacaaagggtccgacagtaccagatgaagactttttcagccttattttacggtcccaggga

SEQ ID NO: 8029 - DNA, 201 bp, Homo sapiens
tcaaggatccagattagatgatcaaagatgtgctccaccacctgctaccacaaagggtccgacagtaccagatgaagactttttcagccttattttacggycccagggaaagagaatggatgaacagagagttcttttacaaagagatcaaaacagagacactgactttgggctaaaggactttttgcaaaataatgcttt

SEQ ID NO: 8030 - DNA, 201 bp, Homo sapiens
gagcatatagcaaccttggaaatgcatatatatttcttggtgaatttgaaactgcctcggaatactacaagaagacactactgttggcccgacagcttaargaccgagctgtagaagcacagtcttgttacagtcttggaaatacatatactttacttcaagactatgaaaaggccattgattatcatctgaagcacttag

SEQ ID NO: 8031 - DNA, 201 bp, Homo sapiens
aactggaacagtgaaattcttgctaagcaaaaacctcttattgccaaaccttctgcaaagctactctttgtcaacagactgaaggggaaaaaatacaaaaygaattcctccactaaagttctccaagatgccagtaattctattgaccaccgaattccaaattctcagaggaaaatcagtgcagatactattggagatgaa

SEQ ID NO: 8032 - DNA, 201 bp, Homo sapiens
tcagggatgcagttatagctcatgagcagcgtctccttattgcaaaagaatttggagataaagcagctgaaagaagagcatatagcaaccttggaaatgcrtatatatttcttggtgaatttgaaactgcctcggaatactacaagaagacactactgttggcccgacagcttaaagaccgagctgtagaagcacagtctt

SEQ ID NO: 8033 - DNA, 201 bp, Homo sapiens
gaatgatgtaaatagttaaccttcagtagtctattaaggcattaatacttctctggacatgcgcgtttgagggtggaggggtcctgtaaggtgcttcatcrtctgtgattactgcttgggatgtgttctttggcagcttgtgagattactttacctagtgtttataaagtaggaagttaagtgaatcatagattagaattt

SEQ ID NO: 8034 - DNA, 201 bp, Homo sapiens
attaatacttctctggacatgcgcgtttgagggtggaggggtcctgtaaggtgcttcatcgtctgtgattactgcttgggatgtgttctttggcagcttgygagattactttacctagtgtttataaagtaggaagttaagtgaatcatagattagaatttaatactcttatggaaataattttttaacatcttaattgac

SEQ ID NO: 8035 - DNA, 102 bp, Homo sapiens
ggcgtttttttatacataaccatggatgtagtgggaaacaatgttgtttggtaaaaataatgtacttgatcaatgtaaaaaagtatataaaatagtcttayt

SEQ ID NO: 8036 - DNA, 201 bp, Homo sapiens
actattggagaccagctgggggaagcgaaagctagtggtaatctgggaaacaccttaaaagttcttgggaattttgacgaagccatagtttgttgtcagcracacctagatatttccagagagcttaatgacaaggtgggagaagcaagagcactttacaatcttgggaatgtgtatcatgccaaagggaaaagttttggt

SEQ ID NO: 8037 - DNA, 201 bp, Homo sapiens
ctgccgcgctggcgtgtcattctttgaagctgcagttcaagttggaactgaagacctaaaaacacttagcgctatttacagccagttgggcaatgcttatytctatttgcatgattatgccaaagcattagaatatcaccatcatgatttaacccttgcaaggactattggagaccagctgggggaagcgaaagctagtgg

SEQ ID NO: 8038 - DNA, 201 bp, Homo sapiens
atcttcttgccagctcacagagtcgccgtctggatgaccagagggctagtttcagtaatttgccagggcttcgtctaacacaaaacagccagtcggtactragccacctgatgactaatgacaacaaagaggctgatgaagatttctttgacatccttgtaaaatgtcaaggatccagattagatgatcaaagatgtgctc

SEQ ID NO: 8039 - DNA, 201 bp, Homo sapiens
cttttttccttaaaaggagaatttatagcactgtaatacagcttaaaatatttttagaatgatgtaaatagttaaccttcagtagtctattaaggcattaytacttctctggacatgcgcgtttgagggtggaggggtcctgtaaggtgcttcatcgtctgtgattactgcttgggatgtgttctttggcagcttgtgaga

SEQ ID NO: 8040 - DNA, 201 bp, Homo sapiens
cttccactccccctaaaatgatgctaaaaacatcatctgttcctgtggtatcccccaacacggatgagtttttagatcttcttgccagctcacagagtcgrcgtctggatgaccagagggctagtttcagtaatttgccagggcttcgtctaacacaaaacagccagtcggtacttagccacctgatgactaatgacaaca

SEQ ID NO: 8041 - DNA, 201 bp, Homo sapiens
cgccccaagttgggacgccggcatagtatggaaaatatggaacttatgaagttaacaccagaaaaggtacagaactggaacagtgaaattcttgctaagcraaaacctcttattgccaaaccttctgcaaagctactctttgtcaacagactgaaggggaaaaaatacaaaacgaattcctccactaaagttctccaagat

SEQ ID NO: 8042 - DNA, 201 bp, Homo sapiens
caccaactcattaatatactaaccggacaatgttctacaaacaattctacattgtaaaggactggattggcacaaaataaaataattttattttattcagyttataatatgactcgatggaggaaaatttgataagcatgagagaagaccattcttttcatgttcgttacagaatggaagcttcttgcctagagctggcct

SEQ ID NO: 8043 - DNA, 106 bp, Homo sapiens
caatggcgtttttttatacataaccatggatgtagtgggaaacaatgttgtttggtaaaaataatgtacttgatcaatgtaaaaaagtatataaaatagtyttact

SEQ ID NO: 8044 - DNA, 15 bp, Homo sapiens
aaaatagtcttacty

SEQ ID NO: 8045 - DNA, 201 bp, Homo sapiens
gaccaccgaattccaaattctcagaggaaaatcagtgcagatactattggagatgaagggttctttgacttattaagccgatttcaaagcaataggatggrtgatcagagatgttgcttacaagaaaagaactgccatacagcttcaacaacaacttcttccactccccctaaaatgatgctaaaaacatcatctgttcct

SEQ ID NO: 8046 - DNA, 201 bp, Homo sapiens
agatcaaaacagagacactgactttgggctaaaggactttttgcaaaataatgctttgttggagtttaaaaattcagggaaaaaatcggcagaccattagytactatggatttattttttttcctttcaaacacggtaaggaaacaatctattacttttttccttaaaaggagaatttatagcactgtaatacagcttaaa

SEQ ID NO: 8047 - DNA, 201 bp, Homo sapiens
gtcaacagactgaaggggaaaaaatacaaaacgaattcctccactaaagttctccaagatgccagtaattctattgaccaccgaattccaaattctcagargaaaatcagtgcagatactattggagatgaagggttctttgacttattaagccgatttcaaagcaataggatggatgatcagagatgttgcttacaagaa

SEQ ID NO: 8048 - DNA, 201 bp, Homo sapiens
aagagcatgttggagcttaggaaatgcatacacagcactaggaaatcatgatcaagcaatgcattttgctgaaaagcacttggaaatttcaagagaggttrgggataaaagtggtgaactaacagcacgacttaatctctcagaccttcaaatggttcttggtctgagctacagcacaaataactccataatgtctgaaaa

SEQ ID NO: 8049 - DNA, 201 bp, Homo sapiens
tagcactgtaatacagcttaaaatatttttagaatgatgtaaatagttaaccttcagtagtctattaaggcattaatacttctctggacatgcgcgtttgkgggtggaggggtcctgtaaggtgcttcatcgtctgtgattactgcttgggatgtgttctttggcagcttgtgagattactttacctagtgtttataaagt

SEQ ID NO: 8050 - DNA, 201 bp, Homo sapiens
agaactgccatacagcttcaacaacaacttcttccactccccctaaaatgatgctaaaaacatcatctgttcctgtggtatcccccaacacggatgagttyttagatcttcttgccagctcacagagtcgccgtctggatgaccagagggctagtttcagtaatttgccagggcttcgtctaacacaaaacagccagtcgg

SEQ ID NO: 8051 - DNA, 201 bp, Homo sapiens
gatgagtttttagatcttcttgccagctcacagagtcgccgtctggatgaccagagggctagtttcagtaatttgccagggcttcgtctaacacaaaacayccagtcggtacttagccacctgatgactaatgacaacaaagaggctgatgaagatttctttgacatccttgtaaaatgtcaaggatccagattagatgat

SEQ ID NO: 8052 - DNA, 201 bp, Homo sapiens
tttttatgaggaaaacctatcattagtgactgctttgggtgaccgagcggcacaaggacgtgcctttggaaatcttggaaacacacattacctccttggcracttcagggatgcagttatagctcatgagcagcgtctccttattgcaaaagaatttggagataaagcagctgaaagaagagcatatagcaaccttggaaa

SEQ ID NO: 8053 - DNA, 201 bp, Homo sapiens
cacgacttaatctctcagaccttcaaatggttcttggtctgagctacagcacaaataactccataatgtctgaaaatactgaaattgatagcagtttgaayggtgtacgccccaagttgggacgccggcatagtatggaaaatatggaacttatgaagttaacaccagaaaaggtacagaactggaacagtgaaattcttg

SEQ ID NO: 8054 - DNA, 201 bp, Homo sapiens
ttttggttgccctggtccccaggatgtaggagaatttccagaagaagtgagagatgctctgcaggcagccgtggatttttatgaggaaaacctatcattartgactgctttgggtgaccgagcggcacaaggacgtgcctttggaaatcttggaaacacacattacctccttggcaacttcagggatgcagttatagctca

SEQ ID NO: 8055 - DNA, 201 bp, Homo sapiens
aaggactttttgcaaaataatgctttgttggagtttaaaaattcagggaaaaaatcggcagaccattagttactatggatttattttttttcctttcaaaracggtaaggaaacaatctattacttttttccttaaaaggagaatttatagcactgtaatacagcttaaaatatttttagaatgatgtaaatagttaacct

SEQ ID NO: 8056 - DNA, 201 bp, Homo sapiens
attcagggaaaaaatcggcagaccattagttactatggatttattttttttcctttcaaacacggtaaggaaacaatctattacttttttccttaaaaggygaatttatagcactgtaatacagcttaaaatatttttagaatgatgtaaatagttaaccttcagtagtctattaaggcattaatacttctctggacatgc

SEQ ID NO: 8057 - DNA, 201 bp, Homo sapiens
tttgagggtggaggggtcctgtaaggtgcttcatcgtctgtgattactgcttgggatgtgttctttggcagcttgtgagattactttacctagtgtttatyaagtaggaagttaagtgaatcatagattagaatttaatactcttatggaaataattttttaacatcttaattgacaatggcgtttttttatacataacca

SEQ ID NO: 8058 - DNA, 201 bp, Homo sapiens
tatgtaaatcaggagactgccgcgctggcgtgtcattctttgaagctgcagttcaagttggaactgaagacctaaaaacacttagcgctatttacagccarttgggcaatgcttatttctatttgcatgattatgccaaagcattagaatatcaccatcatgatttaacccttgcaaggactattggagaccagctggggg

SEQ ID NO: 8059 - DNA, 201 bp, Homo sapiens
gcaagtttgagagccatggttccaagaaactgcataagcatacgaaataagttgcagcctcccgacttataccctggtacttctagtctaaaacaggattrgactctactaatccagccttatacaggatgctgtgttctttgctcctttgtgaatgtctgttgctggtagctggttatgctcatgatgatgactggattg

SEQ ID NO: 8060 - DNA, 201 bp, Homo sapiens
  misc_feature (1)...(201): n = A,T,C or G, or insertion/deletion polymorphism (see Tables 1-2)
ttctcaatggagaagactggaaaccaggtgccttggatgatgcactaagtgatattttaattaattttaagtttcatgattttgaaacatggaagtggcgnttcgaagattcctttggagtggatccatataatgtgttaatggtacttctttgtctgctctgcatcgtggttttagtggctactgagctgtggacatatg

SEQ ID NO: 8061 - DNA, 201 bp, Homo sapiens
attttacttttttttgagagttttgctctgtcacccaggctggagtgaggtggtacaatctcggctcactgcaacctccacctcccaggttcaagagattrtcctgcctcagtctcccgagtagctaggattacagatgtgcatcaccatgcctggctaatttttgtattttttagtagagatggggtttcaccatgttgg

SEQ ID NO: 8062 - DNA, 201 bp, Homo sapiens
aagccgcaggcagcccagaccaaggcagcacatacagccccgcaagaggtgtggctggaccacgtggacaggatccggtcagcagcccctgtggctagagraacaccagcacaaacgacagcctcaagtctccttcgagctttatatccatttggggatgaagtctactttgacagctagcaaggcgacatgcaactgttg

SEQ ID NO: 8063 - DNA, 201 bp, Homo sapiens
attgtatacacaaaataatacacaaagtttgtactttgtgtacaaatacaaatttgtactttgtgtacaaataatacaaaaagtttgtatacacaaacttyttacgttgtggtttggtatattgtcttaactgaattttcttataagaaccccatgaaacttacctgagtttttaaaatgctatccaggacatcatacctt

SEQ ID NO: 8064 - DNA, 201 bp, Homo sapiens
ctttgtctgctctgcatcgtggttttagtggctactgagctgtggacatatgtacgttggtacactcagttgagacgtgttttaatcatcagctttctgtrcagtttgggatggaattggatgtatttatataagctagcttttgcacagcatcaggctgaagtcgccaagatggagccattaaacaatgtgtgtgccaaa

SEQ ID NO: 8065 - DNA, 201 bp, Homo sapiens
attttaattgaagctggaaagcttggacttcctgatgaaaacaaaggcgatatgcattatgatgctgagattatccttaaaagagaaactttgttagaaayacagaagtttctcaatggagaagactggaaaccaggtgccttggatgatgcactaagtgatattttaattaattttaagtttcatgattttgaaacatgg

SEQ ID NO: 8066 - DNA, 201 bp, Homo sapiens
cttaaaaaacattggccattagagaaatagttctatttgcccatccaaatcacctgaatgactttttgaaagaataggggtccacatccccagatcccatrccagctgtgcacagtctgaagcaagcagagtgaaacaagttggcaacttgttccaagcgtgggcctttgcagtctgtgatccagtgttactccaggtccc

SEQ ID NO: 8067 - DNA, 201 bp, Homo sapiens; identical to SEQ ID NO: 8059

SEQ ID NO: 8068 - DNA, 201 bp, Homo sapiens
ataagattgatgagtgtgaaaagaaaaagagggaagactatgaaagtcaaagcaatcctgtttttaggagatacttaaataagattttaattgaagctggmaagcttggacttcctgatgaaaacaaaggcgatatgcattatgatgctgagattatccttaaaagagaaactttgttagaaatacagaagtttctcaatg

SEQ ID NO: 8069 - DNA, 201 bp, Homo sapiens
ctcttctctgcaagaattctgattactacaaaggtgccaacttcaacattcacatttcaacttcaacattcacatttttactgacaattagaattaacaaycacgttatatatgtaaaagcttttcatttcatcttctctttgatatttacatcccataaagtaagaagtgtttattttaagatgaacagatgacaggcat

SEQ ID NO: 8070 - DNA, 201 bp, Homo sapiens
ccacggtggtacccagtcataaatcacctgttttggatacaaagcccaaggagacaggtggaatcctgggggaaggcacaccgaaagaaagcagtactgayagcagccagtcggccaagcctgtctctggccaagacacatcagggaatacagaaggttcacccgcagcggaaaaggcccagctcaagtctgaagccgcag

SEQ ID NO: 8071 - DNA, 201 bp, Homo sapiens
ctgacacctcagcttatctctacgcaggctgcccacaggtcactgtggctgtagtttcatcttttccacagctattactacgcctgcatccttattgttcrttttactttgtttacttagagaaaactgaagactgccagggcaatttagataacatagcttgttatattggtaatctgttttacagagtcagtcgactga

SEQ ID NO: 8072 - DNA, 201 bp, Homo sapiens
gagattatccttaaaagagaaactttgttagaaatacagaagtttctcaatggagaagactggaaaccaggtgccttggatgatgcactaagtgatatttraattaattttaagtttcatgattttgaaacatggaagtggcgattcgaagattcctttggagtggatccatataatgtgttaatggtacttctttgtctg

SEQ ID NO: 8073 - DNA, 201 bp, Homo sapiens
agaaaatctcaggcaaaatatggtatttcaggggaaaaggatgtcagtcctgacttgtcatgtgctgatgaaatatcagaatgttatcacaaacttgattytttaacttataagattgatgagtgtgaaaagaaaaagagggaagactatgaaagtcaaagcaatcctgtttttaggagatacttaaataagattttaatt

SEQ ID NO: 8074 - DNA, 201 bp, Homo sapiens
gatattaccatatcttaattcatattatagcaaatcatattgtcttgtccataggaagtttgcatttttagagatctatacatagagaataccatgatgaygaagaagagagttgggtgtcttccttaactgcagacaggacatcagtcagcactttacattagtctttctgattatcaaaagcattcctcattttaaact

SEQ ID NO: 8075 - DNA, 201 bp, Homo sapiens
gatttttagtaagactattttatatacttttttacattgatcaagtacattatttttaccaaacaacattgtttcccactacatccatggttatgtataamaaaacgccattgtcaattaagatgttaaaaaattatttccataagagtattaaattctaatctatgattcacttaacttcctactttataaacactaggt

SEQ ID NO: 8076 - DNA, 201 bp, Homo sapiens
tctttccctgggaccgtaaaataaggctgaaaaagtcttcatctggtactgtcggaccctttgtggtagcaggtggtggagcacatctttgatcatctaarctggatccctagaagtttatgagagagattaaaagacatactgtgggaaagaaagcaccaagctatgttaaatctctcagtcacaacaagaaaacgcagt

SEQ ID NO: 8077 - DNA, 201 bp, Homo sapiens
caacaaagcattattttgcaaaaagtcctttagcccaaagtcagtgtctctgttttgatctctttgtaaaagaactctctgttcatccattctctttcccrgggaccgtaaaataaggctgaaaaagtcttcatctggtactgtcggaccctttgtggtagcaggtggtggagcacatctttgatcatctaatctggatcc

SEQ ID NO: 8078 - DNA, 201 bp, Homo sapiens
aggacatcataccttatagtatacatgaaacataatgtaatccaggttgtaatttagaactttttttttttttttagctgagcacttaatgtaattaattrcaggttatgactcttaaaaaacattggccattagagaaatagttctatttgcccatccaaatcacctgaatgactttttgaaagaataggggtccacatc

SEQ ID NO: 8079 - DNA, 201 bp, Homo sapiens
aaaggcacttgcagttacattcaccacatttgtaacggagccattgaagcatattggaaaaggaactggggaatttattaaagcactcatgaaggaaattycagcgctgcttcatcttccagtgctgataattatggcattagccatcctgagtttctgctatggtgctggaaaatcagttcatgtgctgagacatatagg

SEQ ID NO: 8080 - DNA, 201 bp, Homo sapiens
tattaaattctaatctatgattcacttaacttcctactttataaacactaggtaaagtaatctcacaagctgccaaagaacacatcccaagcagtaatcayagacgatgaagcaccttacaggacccctccaccctcaaacgcgcatgtccagagaagtattaatgccttaatagactactgaaggttaactatttacatc

SEQ ID NO: 8081 - DNA, 201 bp, Homo sapiens
cattgtcaattaagatgttaaaaaattatttccataagagtattaaattctaatctatgattcacttaacttcctactttataaacactaggtaaagtaarctcacaagctgccaaagaacacatcccaagcagtaatcacagacgatgaagcaccttacaggacccctccaccctcaaacgcgcatgtccagagaagtat

SEQ ID NO: 8082 - DNA, 201 bp, Homo sapiens
aggaatgagccaccatgcccagcccaagaagtagagtttcttttatactgactttggcctaaaaaaacagattttcatggaggaaaaaaaaacctagattrttagtaagactattttatatacttttttacattgatcaagtacattatttttaccaaacaacattgtttcccactacatccatggttatgtataaaaaaa

SEQ ID NO: 8083 - DNA, 201 bp, Homo sapiens
tgacctcaagtgacccgcccttgtcggcctcccaaagtgctgggattacaggcatgagccattgtgcccagcctatatagtgtgaagcttttaggaaaatragaacagggtagacagctgttaaaaacaatgtttaaatggaataatgttgaatgtttacaggctgtaagaactattgtatacacaaaataatacacaaag

SEQ ID NO: 8084 - DNA, 201 bp, Homo sapiens
aactatgatgctgcttcaggaacaatgagaaaatctcaggcaaaatatggtatttcaggggaaaaggatgtcagtcctgacttgtcatgtgctgatgaaaratcagaatgttatcacaaacttgattctttaacttataagattgatgagtgtgaaaagaaaaagagggaagactatgaaagtcaaagcaatcctgttttt

SEQ ID NO: 8085 - DNA, 201 bp, Homo sapiens
cccgcttcggcctcccaaagtgctgggattacaggtgtgagccactgcgcctggctgctgatttatttttcatagacacgggggtctatgttgcccaggtyggtcttgaactcctagcctcaagcgatcctcctgcctcagcctcccaatgtgctgggattacaggaatgagccaccatgcccagcccaagaagtagagtt

SEQ ID NO: 8086 - DNA, 201 bp, Homo sapiens
cttcatcttccagtgctgataattatggcattagccatcctgagtttctgctatggtgctggaaaatcagttcatgtgctgagacatataggcggtcctgmgagcgaacctccccaggcacttcggccacgggatagaagacggcaggaggaaattgattatagacctgatggtggagcaggtgatgccgatttccattat

SEQ ID NO: 8087 - DNA, 201 bp, Homo sapiens
gataaggaagacaaagcttaatgacaactaaggttctagctgacatctttctttcatatttaatttttgtgagttttcatctgttttctgtttgtttatgygtcctaggttcttgacctaaccacatgggttttgttttttgtttttatattagaacttagaaaagtttgttttacagcagtattatggaacagaagagac

SEQ ID NO: 8088 - DNA, 201 bp, Homo sapiens
agtgcagcctccacctcctgggctcaagtggtcctcctgcctcagcctcttaagcagttgggactacaggtgtgtgccagcatgcttgctgttttttttttttttgagacagagtcttgctctgtcactcaggctggagtccagtggcttggtctcagctcactgcaatctctgcctcccaggggttcaagtgattctcct

SEQ ID NO: 8089 - DNA, 201 bp, Homo sapiens
cagtgcagcctccacctcctgggctcaagtggtcctcctgcctcagcctcttaagcagttgggactacaggtgtgtgccagcatgcttgctgttttttttttttttgagacagagtcttgctctgtcactcaggctggagtccagtggcttggtctcagctcactgcaatctctgcctcccaggggttcaagtgattctcc

SEQ ID NO: 8090 - DNA, 201 bp, Homo sapiens
ggaaattgattatagacctgatggtggagcaggtgatgccgatttccattataggggccaaatgggccccactgagcaaggcccttatgccaaaacgtatragggtagaagagagattttgagagagagagatgttgacttgagatttcagactggcaacaagagccctgaagtgctccgggcatttgatgtaccagacgc

SEQ ID NO: 8091 - DNA, 201 bp, Homo sapiens
tttgaaacatggaagtggcgattcgaagattcctttggagtggatccatataatgtgttaatggtacttctttgtctgctctgcatcgtggttttagtggytactgagctgtggacatatgtacgttggtacactcagttgagacgtgttttaatcatcagctttctgttcagtttgggatggaattggatgtatttatat

SEQ ID NO: 8092 - DNA, 201 bp, Homo sapiens
cacgatcatagctcagtgcagcctccacctcctgggctcaagtggtcctcctgcctcagcctcttaagcagttgggactacaggtgtgtgccagcatgctrgctgttttttttttttttgagacagagtcttgctctgtcactcaggctggagtccagtggcttggtctcagctcactgcaatctctgcctcccaggggtt

SEQ ID NO: 8093 - DNA, 201 bp, Homo sapiens
ataagattttaattgaagctggaaagcttggacttcctgatgaaaacaaaggcgatatgcattatgatgctgagattatccttaaaagagaaactttgttrgaaatacagaagtttctcaatggagaagactggaaaccaggtgccttggatgatgcactaagtgatattttaattaattttaagtttcatgattttgaaa

SEQ ID NO: 8094 - DNA, 201 bp, Homo sapiens
attggaaaaggaactggggaatttattaaagcactcatgaaggaaattccagcgctgcttcatcttccagtgctgataattatggcattagccatcctgamtttctgctatggtgctggaaaatcagttcatgtgctgagacatataggcggtcctgagagcgaacctccccaggcacttcggccacgggatagaagacgg

SEQ ID NO: 8095 - DNA, 201 bp, Homo sapiens
ttgctggtagctggttatgctcatgatgatgactggattgaccccacagacatgcttaactatgatgctgcttcaggaacaatgagaaaatctcaggcaaratatggtatttcaggggaaaaggatgtcagtcctgacttgtcatgtgctgatgaaatatcagaatgttatcacaaacttgattctttaacttataagatt

SEQ ID NO: 8096 - DNA, 201 bp, Homo sapiens
tgtattttttagtagagatggggtttcaccatgttggtcaggctggtctcgaactcctgacctcaagtgacccgcccttgtcggcctcccaaagtgctggrattacaggcatgagccattgtgcccagcctatatagtgtgaagcttttaggaaaatcagaacagggtagacagctgttaaaaacaatgtttaaatggaat

SEQ ID NO: 8097 - DNA, 201 bp, Homo sapiens
actgaattttcttataagaaccccatgaaacttacctgagtttttaaaatgctatccaggacatcataccttatagtatacatgaaacataatgtaatccrggttgtaatttagaactttttttttttttttagctgagcacttaatgtaattaattccaggttatgactcttaaaaaacattggccattagagaaatagt

SEQ ID NO: 8098 - DNA, 201 bp, Homo sapiens
ctacagttagttagttactttgttatcatccccttgtaaactgccttcaatatctgggataaggaagacaaagcttaatgacaactaaggttctagctgayatctttctttcatatttaatttttgtgagttttcatctgttttctgtttgtttatgtgtcctaggttcttgacctaaccacatgggttttgttttttgtt

SEQ ID NO: 8099 - DNA, 201 bp, Homo sapiens
gatacttgttttctagagacagggtcttgctctgtcacccaggctggagtgcagtggcacgatcatagctcagtgcagcctccacctcctgggctcaagtrgtcctcctgcctcagcctcttaagcagttgggactacaggtgtgtgccagcatgcttgctgttttttttttttttgagacagagtcttgctctgtcactc

SEQ ID NO: 8100 - DNA, 201 bp, Homo sapiens
cggtcctgagagcgaacctccccaggcacttcggccacgggatagaagacggcaggaggaaattgattatagacctgatggtggagcaggtgatgccgatrtccattataggggccaaatgggccccactgagcaaggcccttatgccaaaacgtatgagggtagaagagagattttgagagagagagatgttgacttgag

SEQ ID NO: 8101 - DNA, 201 bp, Homo sapiens
ccaggtgccttggatgatgcactaagtgatattttaattaattttaagtttcatgattttgaaacatggaagtggcgattcgaagattcctttggagtggytccatataatgtgttaatggtacttctttgtctgctctgcatcgtggttttagtggctactgagctgtggacatatgtacgttggtacactcagttgaga

SEQ ID NO: 8102 - DNA, 201 bp, Homo sapiens
atgccaaaaatactatgagctcttactagtcaaccctatttggttggtcccaccaacaaaggcacttgcagttacattcaccacatttgtaacggagccaytgaagcatattggaaaaggaactggggaatttattaaagcactcatgaaggaaattccagcgctgcttcatcttccagtgctgataattatggcattagc

SEQ ID NO: 8103 - DNA, 201 bp, Homo sapiens; identical to SEQ ID NO: 8059

SEQ ID NO: 8104 - DNA, 201 bp, Homo sapiens
  misc_feature (1)...(201): n = A,T,C or G, or insertion/deletion polymorphism (see Tables 1-2)
ctggaagtatctgggaatggtttagaagttcatggacctataaggatgacccatgccaaaaatactatgagctcttactagtcaaccctatttggttggtnccaccaacaaaggcacttgcagttacattcaccacatttgtaacggagccattgaagcatattggaaaaggaactggggaatttattaaagcactcatga

SEQ ID NO: 8105 - DNA, 201 bp, Homo sapiens
ataatgttgaatgtttacaggctgtaagaactattgtatacacaaaataatacacaaagtttgtactttgtgtacaaatacaaatttgtactttgtgtacraataatacaaaaagtttgtatacacaaactttttacgttgtggtttggtatattgtcttaactgaattttcttataagaaccccatgaaacttacctgag

SEQ ID NO: 8106 - DNA, 201 bp, Homo sapiens
ttacttttttttgagagttttgctctgtcacccaggctggagtgaggtggtacaatctcggctcactgcaacctccacctcccaggttcaagagattctcrtgcctcagtctcccgagtagctaggattacagatgtgcatcaccatgcctggctaatttttgtattttttagtagagatggggtttcaccatgttggtca

SEQ ID NO: 8107 - DNA, 201 bp, Homo sapiens
tttgaaagaataggggtccacatccccagatcccatcccagctgtgcacagtctgaagcaagcagagtgaaacaagttggcaacttgttccaagcgtgggyctttgcagtctgtgatccagtgttactccaggtcccagtctgtcccatacttgtcttttgctacagttagttagttactttgttatcatccccttgtaaa

SEQ ID NO: 8108 - DNA, 201 bp, Homo sapiens
caaaatatggtatttcaggggaaaaggatgtcagtcctgacttgtcatgtgctgatgaaatatcagaatgttatcacaaacttgattctttaacttataayattgatgagtgtgaaaagaaaaagagggaagactatgaaagtcaaagcaatcctgtttttaggagatacttaaataagattttaattgaagctggaaagc

SEQ ID NO: 8109 - DNA, 201 bp, Homo sapiens
ccattgaagcatattggaaaaggaactggggaatttattaaagcactcatgaaggaaattccagcgctgcttcatcttccagtgctgataattatggcatragccatcctgagtttctgctatggtgctggaaaatcagttcatgtgctgagacatataggcggtcctgagagcgaacctccccaggcacttcggccacgg

SEQ ID NO: 8110 - DNA, 201 bp, Homo sapiens
ttgggatggaattggatgtatttatataagctagcttttgcacagcatcaggctgaagtcgccaagatggagccattaaacaatgtgtgtgccaaaaagayggactggactggaagtatctgggaatggtttagaagttcatggacctataaggatgacccatgccaaaaatactatgagctcttactagtcaaccctatt

SEQ ID NO: 8111 - DNA, 201 bp, Homo sapiens
tgttttctgtttgtttatgtgtcctaggttcttgacctaaccacatgggttttgttttttgtttttatattagaacttagaaaagtttgttttacagcagrattatggaacagaagagaccattttaaataatttttttaaacagcccaaaacacacaaaagatacttgttttctagagacagggtcttgctctgtcaccc

SEQ ID NO: 8112 - DNA, 201 bp, Homo sapiens
aaagttgccattgcccggcgtatgccacctccagccaaccttccaagcctgaaagccgagaacaaaggcaatgaccccaatgtctcactagtgccaaaagwcggaacaggatgggcaagcaaacaggagcagtccgaccccaagagttccgatgcctcaaccgctcagccgccggaatcgcagccactgccggcttcacag

SEQ ID NO: 8113 - DNA, 201 bp, Homo sapiens
gaccccaatgtctcactagtgccaaaagacggaacaggatgggcaagcaaacaggagcagtccgaccccaagagttccgatgcctcaaccgctcagccgcyggaatcgcagccactgccggcttcacagacgcctgcctccaaccagccgaaacgacccccagcagcccccgagaacactcctttggttccaagcggggta

SEQ ID NO: 8114 - DNA, 201 bp, Homo sapiens
agaatgatgatggttgggcaggggcccatgaagaggttgactacactgaaaagctcaagttcagcgatgaggaagatgggcgagactctgatgaggagggwgctgagggccacagggattcccaatcagcttctggtgaggaacggccccctgaagcagatggcaaaaagggcaactcccccaacagcgaaccgcccactc

SEQ ID NO: 8115 - DNA, 201 bp, Homo sapiens
ccgccctatggaccccaggggccttaccgataccccactcctgatgggcccagccgttttccccgtgtggcgggcccccgaggctcagggccaccaatgcrcttagtagagcctgtgggtcgtccctctattctcaaagaggataatctcaaagagtttgatcagttggatcaggagaatgatgatggttgggcaggggcc

SEQ ID NO: 8116 - DNA, 201 bp, Homo sapiens
tcctaagacggcctgggcagaaacctctcggcctccagagacagagccgggacctcctgccccaaagcctcccctacccccacctcaccggggccccgccrggaactggggcccccctggggactacccagatcgtgggggtcctccctgcaagcccccagcacctgaagatgaggatgaggcatggcggcagcgacgaaa

SEQ ID NO: 8117 - DNA, 201 bp, Homo sapiens
aggacaaggctgccaaggaaagggagtctgccgaacagtcgtctgggcccggaccaagcctccgcccccaaaattctacaacttggagggacggaggtggkcgtggccctgatgagctggagggcccggactccaaacttcatcatggtcatgatccccggggtgggctacagccttcaggcccaccccagttccctccct

SEQ ID NO: 8118 - DNA, 201 bp, Homo sapiens
gatacgtataagggcaagtccttagagatccagaaacccgctgttgcccctcgccatggcctgcagagtctcgggaaagttgccattgcccggcgtatgcsacctccagccaaccttccaagcctgaaagccgagaacaaaggcaatgaccccaatgtctcactagtgccaaaagacggaacaggatgggcaagcaaacag

SEQ ID NO: 8119 - DNA, 201 bp, Homo sapiens
ccagtcctttgcctgacacatcgttgcttcaggtacgccaggatctgccatccccttcggatttttattctactcctctgcagcctggtggccaaagtggmtttctcccttcaggggctcctgcccagcagatgcttctacccatggtagactcacagctgcctgtggtgaactttggctccctgccgccagcaccacctc

SEQ ID NO: 8120 - DNA, 201 bp, Homo sapiens
gcagcaggataaaccgcctcgtttccggaggctgaagcaggaacgggagaatgccgcaagggggtctgagggcaagccctccctaacccttccagcctccrctcctggacctgaggaggccctcacaacagtcacagtggccccagcacctcgccgggcagctgccaagtctcctgatctgtcaaaccagaactcagacca

SEQ ID NO: 8121 - DNA, 201 bp, Homo sapiens; identical to SEQ ID NO: 8117

SEQ ID NO: 8122 - DNA, 201 bp, Homo sapiens
acggagcttctcaagtcagcggccaggcatggaacggcagaatcggcgccctggcccagggggcaaggctggcagcagtggcagcagcagtggaggaggcrgtgggggtcctggaggaaggaccgggccaggacgaggcgacaagaggagctggccctctcccaagaaccgaagtcgtcctccagaggagcgtcccccggg

SEQ ID NO: 8123 - DNA, 201 bp, Homo sapiens
agccagagagccaaggatttgagtaaacggagcttctcaagtcagcggccaggcatggaacggcagaatcggcgccctggcccagggggcaaggctggcarcagtggcagcagcagtggaggaggcggtgggggtcctggaggaaggaccgggccaggacgaggcgacaagaggagctggccctctcccaagaaccgaagt

SEQ ID NO: 8124 - DNA, 201 bp, Homo sapiens
atctggctccttcagacaaggaggctcccacacccaaggagggaacactcacccaggtccctctcgctcccccaccaccaggagccccaccttcaccagcsccagcccgcttcactgcccggggtgggcgagtcttcactcccagaggggtgccatctcgccggggccgaggaggagggaggccccctcctcaagtttgcc

SEQ ID NO: 8125 - DNA, 201 bp, Homo sapiens
acaaagaggcacccccaccagtactgctgacacccaaggctgtgggaactcctgggggaggtggaggtggagccgtaccaggtatttcagccatgtcccgyggagatctgagccagagagccaaggatttgagtaaacggagcttctcaagtcagcggccaggcatggaacggcagaatcggcgccctggcccagggggca

SEQ ID NO: 8126 - DNA, 201 bp, Homo sapiens
gataaaccgcctcgtttccggaggctgaagcaggaacgggagaatgccgcaagggggtctgagggcaagccctccctaacccttccagcctccgctcctgsacctgaggaggccctcacaacagtcacagtggccccagcacctcgccgggcagctgccaagtctcctgatctgtcaaaccagaactcagaccaagccaat

SEQ ID NO: 8127 - DNA, 201 bp, Homo sapiens
aggctgcggatgaggatgacaaggggatgaggagcgagactcctccagtacctcccccaccaccctatctggccagttatccaggctttcctgagaatggrgcccctgggcccccaatctctcgctttcctctggaggaaccagggccccgtccactcccctggcccccaggcagtgatgaagtggccaagatacaaactc

SEQ ID NO: 8128 - DNA, 201 bp, Homo sapiens
ccaagaaggagccccctaaggaggagactgcacagctgacggggccagaagcaggccgaaagcctgcccgcggagtcgggagtggaggccagggccccccmccaccacgcagagagagtcgcacagagacccgctggggccctcgtccagggagcagtcgtcgtggaatccctccagaggagccaggggccccaccccgcc

SEQ ID NO: 8129 - DNA, 201 bp, Homo sapiens; identical to SEQ ID NO: 8114

SEQ ID NO: 8130 - DNA, 201 bp, Homo sapiens
ggctgcggatgaggatgacaaggggatgaggagcgagactcctccagtacctcccccaccaccctatctggccagttatccaggctttcctgagaatggarcccctgggcccccaatctctcgctttcctctggaggaaccagggccccgtccactcccctggcccccaggcagtgatgaagtggccaagatacaaactcc

SEQ ID NO: 8131 - DNA, 201 bp, Homo sapiens; identical to SEQ ID NO: 8115

SEQ ID NO: 8132 - DNA, 201 bp, Homo sapiens
cggagcccagctcctcaggccagcgcctgtatcctgaggttttctatggcagtgctgggccttccagttctcagatctctgggggagccatggactctcarttacatccaaacagtggaggcttccgccctgggacaccctcactgcacccttacagatcacagcccctatacctaccccccggcccagcccctccctcag

SEQ ID NO: 8133 - DNA, 201 bp, Homo sapiens
ggggagccatggactctcaattacatccaaacagtggaggcttccgccctgggacaccctcactgcacccttacagatcacagcccctatacctacccccsggcccagcccctccctcagcactgctctctggggtagctctcaagggccagtttctggatttctccacaatgcaagctacagagctggggaagttgccgg

SEQ ID NO: 8134 - DNA, 201 bp, Homo sapiens
cctaggagaccaccacctgccccccacgatggggacagaaaggagctgccccgggagcagcctctgccccctggccccattggcacagaacgatcacagcrtacagaccgaggcacagagcctggccccattcggccatcccatcgacctggtcccccagtccagtttggcactagtgacaaggactcagacttacgccta

SEQ ID NO: 8135 - DNA, 201 bp, Homo sapiens
gacccccactttgaggagccggggccaatggtgagaggggtgggtgggactcctcgggactctgccggggttagtccctttccccctaaacgtcgggagcrgcctcccagaaaaccagagctgctacaggaggaatctttgccacctcctcatagctctggattcttgggctctaagcctgagggcccaggccctcaggca

SEQ ID NO: 8136 - DNA, 201 bp, Homo sapiens
tacagtggagtcttccgcacccagcgcgtcgacctttaccagcaggcctccccaccagatgccctgcgctggatacctaagccttgggagcggacagggcygccacctcgagaagggccctcccgacgggcagaggagcctgggtcccgaggggacaaggagcctgggttgcccccaccccgctgagggagttcctcttgc

SEQ ID NO: 8137 - DNA, 191 bp, Homo sapiens
gcccccaccccgctgagggagttcctcttgccccctacccccggggcttgtatatagattataaatatataagggggaaaggggtgggcggggaggggttstggggctggggcctcacttcccctcctcccccttcccctggtcccctgtccctggggctgtttgttaaaaaagagtaataaaaggattta

SEQ ID NO: 8138 - DNA, 201 bp, Homo sapiens
ccacctgctgccccttctaccccagctccaccacctgcagtccctaaagaactccctgcacctccagctccacctccagcatcagccccaacaccagagamagaacctgaagagccagcacaggcccctcctgcccaatctactcctactccaggtgtggctgcggctcccactctggtgagtggtggtggcagtaccagt

SEQ ID NO: 8139 - DNA, 201 bp, Homo sapiens; identical to SEQ ID NO: 8112

SEQ ID NO: 8140 - DNA, 201 bp, Homo sapiens
gcagcaccagtggcagcagcatcaacagggctctgcccctcctaccccagtgcccccatcaccaccacagcctgtgaccctgggggctgtgccagctccamaggctccacccccgccccccaaggccctgtacccaggtgctctgggccggcccccacccatgcccccaatgaactttgatccccgatggatgatgattcc

SEQ ID NO: 8141 - DNA, 201 bp, Homo sapiens
ccccgctagcttggggcgagcagagctgcatccagtggaactaaagccgttccaggattatcaaaaactgagcagcaaccttgggggacctggatcatcayggactcccccaactggaaggtccttctctggcctcaattcccgtctcaaggccacgccttccacctacagtggagtcttccgcacccagcgcgtcgacct

SEQ ID NO: 8142 - DNA, 201 bp, Homo sapiens
cgttccaggattatcaaaaactgagcagcaaccttgggggacctggatcatcacggactcccccaactggaaggtccttctctggcctcaattcccgtctsaaggccacgccttccacctacagtggagtcttccgcacccagcgcgtcgacctttaccagcaggcctccccaccagatgccctgcgctggatacctaagc

SEQ ID NO: 8143 - DNA, 201 bp, Homo sapiens
aaacggagcttctcaagtcagcggccaggcatggaacggcagaatcggcgccctggcccagggggcaaggctggcagcagtggcagcagcagtggaggagscggtgggggtcctggaggaaggaccgggccaggacgaggcgacaagaggagctggccctctcccaagaaccgaagtcgtcctccagaggagcgtcccccg

SEQ ID NO: 8144 - DNA, 201 bp, Homo sapiens
aggggctcctgcccagcagatgcttctacccatggtagactcacagctgcctgtggtgaactttggctccctgccgccagcaccacctcctgccccacctyccctttctctgttacctgtgggccctgctctgcagccccccagcctggctgtgcggcccccacctgctcctgctactcgggtgctgccttcacctgccag

SEQ ID NO: 8145 - DNA, 201 bp, Homo sapiens
cagacagtgggggctcaagctcagagccatttgaccgtcatgcacctgctatgttacgggaacggggcactccaccggtggatccaaagttggcctgggtrggagatgtcttcaccgccacacccgctgaaccccgcccacttacctcacctctgcgccaggctgcggatgaggatgacaaggggatgaggagcgagactc

SEQ ID NO: 8146 - DNA, 201 bp, Homo sapiens
gaaagagtgggtcctacctcttgccggggtcggggccgaggcgagtattttgccagagggaggggttttcgggggacctatgggggacgagggcggggagsccgaagccgggaattccgcagttaccgagagtttcgaggagatgatgggcgtggaggtgggacagggggaccaaaccaccctcctgctccccgaggccgc

SEQ ID NO: 8147 - DNA, 201 bp, Homo sapiens
aggtgggacagggggaccaaaccaccctcctgctccccgaggccgcactgccagcgagacacggagcgagggttcagagtatgaggaaatccccaagcggygccggcagcggggctcagaaacaggcagcgagacccatgagagtgatctggctccttcagacaaggaggctcccacacccaaggagggaacactcaccca

SEQ ID NO: 8148 - DNA, 201 bp, Homo sapiens
tcccacacccaaggagggaacactcacccaggtccctctcgctcccccaccaccaggagccccaccttcaccagccccagcccgcttcactgcccggggtsggcgagtcttcactcccagaggggtgccatctcgccggggccgaggaggagggaggccccctcctcaagtttgcccaggctggagccctccagccaagtc

SEQ ID NO: 8149 - DNA, 201 bp, Homo sapiens
tctcctaggcccccaacccgatacgagccccagagggtcaacagcggcctcagttctgacccccactttgaggagccggggccaatggtgagaggggtggrtgggactcctcgggactctgccggggttagtccctttccccctaaacgtcgggagcggcctcccagaaaaccagagctgctacaggaggaatctttgcca

SEQ ID NO: 8150 - DNA, 201 bp, Homo sapiens
  misc_feature (1)...(201): n = A,T,C or G, or insertion/deletion polymorphism (see Tables 1-2)
cacagcaaccctgctggcatccaacaggctctggcccagcttagtagccgtcaagggagtgtaactgcaccagggggtcatccaaggcacaagcctgggcntccccaagcccctcagggcccctctcctaggcccccaacccgatacgagccccagagggtcaacagcggcctcagttctgacccccactttgaggagccg

SEQ ID NO: 8151 - DNA, 201 bp, Homo sapiens; identical to SEQ ID NO: 8118

SEQ ID NO: 8152 - DNA, 201 bp, Homo sapiens
attggcacagaacgatcacagcgtacagaccgaggcacagagcctggccccattcggccatcccatcgacctggtcccccagtccagtttggcactagtgrcaaggactcagacttacgcctagtggtaggagacagcttgaaagcagagaaggagctaacagcatcagtcactgaggccattcctgtatcacgagactgg

SEQ ID NO: 8153 - DNA, 201 bp, Homo sapiens
tacagaccgaggcacagagcctggccccattcggccatcccatcgacctggtcccccagtccagtttggcactagtgacaaggactcagacttacgcctartggtaggagacagcttgaaagcagagaaggagctaacagcatcagtcactgaggccattcctgtatcacgagactgggagctgcttcccagtgctgctgc

SEQ ID NO: 8154 - DNA, 201 bp, Homo sapiens; identical to SEQ ID NO: 8113

SEQ ID NO: 8155 - DNA, 201 bp, Homo sapiens
ccccagtccagtttggcactagtgacaaggactcagacttacgcctagtggtaggagacagcttgaaagcagagaaggagctaacagcatcagtcactgargccattcctgtatcacgagactgggagctgcttcccagtgctgctgcctctgctgagccacaatccaagaacctggattctgggcactgtgtcccggagc

SEQ ID NO: 8156 - DNA, 201 bp, Homo sapiens
tggaggcttccgccctgggacaccctcactgcacccttacagatcacagcccctatacctaccccccggcccagcccctccctcagcactgctctctgggktagctctcaagggccagtttctggatttctccacaatgcaagctacagagctggggaagttgccggctggaggagttctctaccctccaccttccttcct

SEQ ID NO: 8157 - DNA, 201 bp, Homo sapiens
ctgcatccagtggaactaaagccgttccaggattatcaaaaactgagcagcaaccttgggggacctggatcatcacggactcccccaactggaaggtcctyctctggcctcaattcccgtctcaaggccacgccttccacctacagtggagtcttccgcacccagcgcgtcgacctttaccagcaggcctccccaccagat

SEQ ID NO: 8158 - DNA, 201 bp, Homo sapiens
ccacctgccccccacgatggggacagaaaggagctgccccgggagcagcctctgccccctggccccattggcacagaacgatcacagcgtacagaccgagscacagagcctggccccattcggccatcccatcgacctggtcccccagtccagtttggcactagtgacaaggactcagacttacgcctagtggtaggagac

SEQ ID NO: 8159 - DNA, 201 bp, Homo sapiens; identical to SEQ ID NO: 8119

SEQ ID NO: 8160 - DNA, 201 bp, Homo sapiens; identical to SEQ ID NO: 8117

SEQ ID NO: 8161 - DNA, 201 bp, Homo sapiens; identical to SEQ ID NO: 8120

SEQ ID NO: 8162 - DNA, 201 bp, Homo sapiens; identical to SEQ ID NO: 8122

SEQ ID NO: 8163 - DNA, 201 bp, Homo sapiens; identical to SEQ ID NO: 8123

SEQ ID NO: 8164 - DNA, 201 bp, Homo sapiens; identical to SEQ ID NO: 8124

SEQ ID NO: 8165 - DNA, 201 bp, Homo sapiens; identical to SEQ ID NO: 8125

SEQ ID NO: 8166 - DNA, 201 bp, Homo sapiens; identical to SEQ ID NO: 8126

SEQ ID NO: 8167 - DNA, 201 bp, Homo sapiens; identical to SEQ ID NO: 8114

SEQ ID NO: 8168 - DNA, 201 bp, Homo sapiens; identical to SEQ ID NO: 8127

SEQ ID NO: 8169 - DNA, 201 bp, Homo sapiens; identical to SEQ ID NO: 8128

SEQ ID NO: 8170 - DNA, 201 bp, Homo sapiens; identical to SEQ ID NO: 8115

SEQ ID NO: 8171 - DNA, 201 bp, Homo sapiens; identical to SEQ ID NO: 8130

SEQ ID NO: 8172 - DNA, 201 bp, Homo sapiens; identical to SEQ ID NO: 8132

SEQ ID NO: 8173 - DNA, 201 bp, Homo sapiens; identical to SEQ ID NO: 8133

SEQ ID NO: 8174 - DNA, 201 bp, Homo sapiens; identical to SEQ ID NO: 8134

SEQ ID NO: 8175 - DNA, 201 bp, Homo sapiens; identical to SEQ ID NO: 8135

SEQ ID NO: 8176 - DNA, 201 bp, Homo sapiens; identical to SEQ ID NO: 8136

SEQ ID NO: 8177 - DNA, 190 bp, Homo sapiens
gcccccaccccgctgagggagttcctcttgccccctacccccggggcttgtatatagattataaatatataagggggaaaggggtgggcggggaggggttstggggctggggcctcacttcccctcctcccccttcccctggtcccctgtccctggggctgtttgttaaaaaagagtaataaaaggattt

SEQ ID NO: 8178 - DNA, 201 bp, Homo sapiens; identical to SEQ ID NO: 8138

SEQ ID NO: 8179 - DNA, 201 bp, Homo sapiens; identical to SEQ ID NO: 8112

SEQ ID NO: 8180 - DNA, 201 bp, Homo sapiens; identical to SEQ ID NO: 8140

SEQ ID NO: 8181 - DNA, 201 bp, Homo sapiens
ccccgctagcttggggcgagcagagctgcatccagtggaactaaagccgttccaggattatcaaaaactgagcagcaaccttgggggacctggatcatcayggactcccccaactggaagacgcccttcttcccttaggtccttctctggcctcaattcccgtctcaaggccacgccttccacctacagtggagtcttccg

SEQ ID NO: 8182 - DNA, 201 bp, Homo sapiens
aactgagcagcaaccttgggggacctggatcatcacggactcccccaactggaagacgcccttcttcccttaggtccttctctggcctcaattcccgtctsaaggccacgccttccacctacagtggagtcttccgcacccagcgcgtcgacctttaccagcaggcctccccaccagatgccctgcgctggatacctaagc

SEQ ID NO: 8183 - DNA, 201 bp, Homo sapiens; identical to SEQ ID NO: 8143

SEQ ID NO: 8184 - DNA, 201 bp, Homo sapiens; identical to SEQ ID NO: 8144

SEQ ID NO: 8185 - DNA, 201 bp, Homo sapiens; identical to SEQ ID NO: 8116

SEQ ID NO: 8186 - DNA, 201 bp, Homo sapiens; identical to SEQ ID NO: 8145

SEQ ID NO: 8187 - DNA, 201 bp, Homo sapiens; identical to SEQ ID NO: 8146

SEQ ID NO: 8188 - DNA, 201 bp, Homo sapiens; identical to SEQ ID NO: 8147

SEQ ID NO: 8189 - DNA, 201 bp, Homo sapiens; identical to SEQ ID NO: 8148

SEQ ID NO: 8190 - DNA, 201 bp, Homo sapiens; identical to SEQ ID NO: 8149

SEQ ID NO: 8191 - DNA, 201 bp, Homo sapiens; identical to SEQ ID NO: 8150
  misc_feature (1)...(201): n = A,T,C or G, or insertion/deletion polymorphism (see Tables 1-2)

SEQ ID NO: 8192 - DNA, 201 bp, Homo sapiens
aacccgctggcattttcgaccctctctccgtcttgttctccagttgcccctcgccatggcctgcagagtctcgggaaagttgccattgcccggcgtatgcsacctccagccaaccttccaagcctgaaagccgagaacaaaggcaatgaccccaatgtctcactagtgccaaaagacggaacaggatgggcaagcaaacag

SEQ ID NO: 8193 - DNA, 201 bp, Homo sapiens; identical to SEQ ID NO: 8152

SEQ ID NO: 8194 - DNA, 201 bp, Homo sapiens; identical to SEQ ID NO: 8153

SEQ ID NO: 8195 - DNA, 201 bp, Homo sapiens; identical to SEQ ID NO: 8113

SEQ ID NO: 8196 - DNA, 201 bp, Homo sapiens; identical to SEQ ID NO: 8155

SEQ ID NO: 8197 - DNA, 201 bp, Homo sapiens; identical to SEQ ID NO: 8156

SEQ ID NO: 8198 - DNA, 201 bp, Homo sapiens
aagccgttccaggattatcaaaaactgagcagcaaccttgggggacctggatcatcacggactcccccaactggaagacgcccttcttcccttaggtcctyctctggcctcaattcccgtctcaaggccacgccttccacctacagtggagtcttccgcacccagcgcgtcgacctttaccagcaggcctccccaccagat

SEQ ID NO: 8199 - DNA, 201 bp, Homo sapiens; identical to SEQ ID NO: 8158

SEQ ID NO: 8200 - DNA, 201 bp, Homo sapiens; identical to SEQ ID NO: 8119

SEQ ID NO: 8201 - DNA, 201 bp, Homo sapiens; identical to SEQ ID NO: 8117

SEQ ID NO: 8202 - DNA, 201 bp, Homo sapiens; identical to SEQ ID NO: 8120

SEQ ID NO: 8203 - DNA, 201 bp, Homo sapiens; identical to SEQ ID NO: 8122

SEQ ID NO: 8204 - DNA, 201 bp, Homo sapiens; identical to SEQ ID NO: 8123

SEQ ID NO: 8205 - DNA, 201 bp, Homo sapiens; identical to SEQ ID NO: 8124

SEQ ID NO: 8206 - DNA, 201 bp, Homo sapiens; identical to SEQ ID NO: 8125

SEQ ID NO: 8207 - DNA, 201 bp, Homo sapiens; identical to SEQ ID NO: 8126

SEQ ID NO: 8208 - DNA, 201 bp, Homo sapiens; identical to SEQ ID NO: 8114

SEQ ID NO: 8209 - DNA, 201 bp, Homo sapiens; identical to SEQ ID NO: 8127

SEQ ID NO: 8210 - DNA, 201 bp, Homo sapiens; identical to SEQ ID NO: 8128

SEQ ID NO: 8211 - DNA, 201 bp, Homo sapiens; identical to SEQ ID NO: 8115

SEQ ID NO: 8212 - DNA, 201 bp, Homo sapiens; identical to SEQ ID NO: 8130

SEQ ID NO: 8213 - DNA, 201 bp, Homo sapiens; identical to SEQ ID NO: 8132

SEQ ID NO: 8214 - DNA, 201 bp, Homo sapiens; identical to SEQ ID NO: 8133

SEQ ID NO: 8215 - DNA, 201 bp, Homo sapiens; identical to SEQ ID NO: 8134

SEQ ID NO: 8216 - DNA, 201 bp, Homo sapiens; identical to SEQ ID NO: 8135

SEQ ID NO: 8217 - DNA, 201 bp, Homo sapiens; identical to SEQ ID NO: 8136

SEQ ID NO: 8218 - DNA, 191 bp, Homo sapiens; identical to SEQ ID NO: 8137

SEQ ID NO: 8219 - DNA, 201 bp, Homo sapiens; identical to SEQ ID NO: 8138

SEQ ID NO: 8220 - DNA, 201 bp, Homo sapiens; identical to SEQ ID NO: 8112

SEQ ID NO: 8221 - DNA, 201 bp, Homo sapiens; identical to SEQ ID NO: 8140

SEQ ID NO: 8222 - DNA, 201 bp, Homo sapiens; identical to SEQ ID NO: 8141

SEQ ID NO: 8223 - DNA, 201 bp, Homo sapiens; identical to SEQ ID NO: 8142

SEQ ID NO: 8224 - DNA, 201 bp, Homo sapiens; identical to SEQ ID NO: 8143

SEQ ID NO: 8225 - DNA, 201 bp, Homo sapiens; identical to SEQ ID NO: 8144

SEQ ID NO: 8226 - DNA, 201 bp, Homo sapiens; identical to SEQ ID NO: 8116

SEQ ID NO: 8227 - DNA, 201 bp, Homo sapiens; identical to SEQ ID NO: 8145

SEQ ID NO: 8228 - DNA, 201 bp, Homo sapiens; identical to SEQ ID NO: 8146

SEQ ID NO: 8229 - DNA, 201 bp, Homo sapiens; identical to SEQ ID NO: 8147

SEQ ID NO: 8230 - DNA, 201 bp, Homo sapiens; identical to SEQ ID NO: 8148

SEQ ID NO: 8231 - DNA, 201 bp, Homo sapiens; identical to SEQ ID NO: 8149

SEQ ID NO: 8232 - DNA, 201 bp, Homo sapiens; identical to SEQ ID NO: 8150
  misc_feature (1)...(201): n = A,T,C or G, or insertion/deletion polymorphism (see Tables 1-2)

SEQ ID NO: 8233 - DNA, 201 bp, Homo sapiens; identical to SEQ ID NO: 8192

SEQ ID NO: 8234 - DNA, 201 bp, Homo sapiens; identical to SEQ ID NO: 8152

SEQ ID NO: 8235 - DNA, 201 bp, Homo sapiens; identical to SEQ ID NO: 8153

SEQ ID NO: 8236 - DNA, 201 bp, Homo sapiens; identical to SEQ ID NO: 8113

SEQ ID NO: 8237 - DNA, 201 bp, Homo sapiens; identical to SEQ ID NO: 8155

SEQ ID NO: 8238 - DNA, 201 bp, Homo sapiens; identical to SEQ ID NO: 8156

SEQ ID NO: 8239 - DNA, 201 bp, Homo sapiens; identical to SEQ ID NO: 8157

SEQ ID NO: 8240 - DNA, 201 bp, Homo sapiens; identical to SEQ ID NO: 8158

SEQ ID NO: 8241 - DNA, 201 bp, Homo sapiens; identical to SEQ ID NO: 8119

SEQ ID NO: 8242 - DNA, 201 bp, Homo sapiens; identical to SEQ ID NO: 8117

SEQ ID NO: 8243 - DNA, 201 bp, Homo sapiens; identical to SEQ ID NO: 8120

SEQ ID NO: 8244 - DNA, 201 bp, Homo sapiens; identical to SEQ ID NO: 8122

SEQ ID NO: 8245 - DNA, 201 bp, Homo sapiens; identical to SEQ ID NO: 8123

SEQ ID NO: 8246 - DNA, 201 bp, Homo sapiens; identical to SEQ ID NO: 8124

SEQ ID NO: 8247 - DNA, 201 bp, Homo sapiens; identical to SEQ ID NO: 8125

SEQ ID NO: 8248 - DNA, 201 bp, Homo sapiens; identical to SEQ ID NO: 8126

SEQ ID NO: 8249 - DNA, 201 bp, Homo sapiens; identical to SEQ ID NO: 8114

SEQ ID NO: 8250 - DNA, 201 bp, Homo sapiens; identical to SEQ ID NO: 8127

SEQ ID NO: 8251 - DNA, 201 bp, Homo sapiens; identical to SEQ ID NO: 8128

SEQ ID NO: 8252 - DNA, 201 bp, Homo sapiens; identical to SEQ ID NO: 8115

SEQ ID NO: 8253 - DNA, 201 bp, Homo sapiens; identical to SEQ ID NO: 8130

SEQ ID NO: 8254 - DNA, 201 bp, Homo sapiens; identical to SEQ ID NO: 8132

SEQ ID NO: 8255 - DNA, 201 bp, Homo sapiens; identical to SEQ ID NO: 8133

SEQ ID NO: 8256 - DNA, 201 bp, Homo sapiens; identical to SEQ ID NO: 8134

SEQ ID NO: 8257 - DNA, 201 bp, Homo sapiens; identical to SEQ ID NO: 8135

SEQ ID NO: 8258 - DNA, 201 bp, Homo sapiens; identical to SEQ ID NO: 8136

SEQ ID NO: 8259 - DNA, 191 bp, Homo sapiens; identical to SEQ ID NO: 8137

SEQ ID NO: 8260 - DNA, 201 bp, Homo sapiens; identical to SEQ ID NO: 8138

SEQ ID NO: 8261 - DNA, 201 bp, Homo sapiens; identical to SEQ ID NO: 8112

SEQ ID NO: 8262 - DNA, 201 bp, Homo sapiens; identical to SEQ ID NO: 8140

SEQ ID NO: 8263 - DNA, 201 bp, Homo sapiens; identical to SEQ ID NO: 8141

SEQ ID NO: 8264 - DNA, 201 bp, Homo sapiens; identical to SEQ ID NO: 8142

SEQ ID NO: 8265 - DNA, 201 bp, Homo sapiens; identical to SEQ ID NO: 8143

SEQ ID NO: 8266 - DNA, 201 bp, Homo sapiens; identical to SEQ ID NO: 8144

SEQ ID NO: 8267 - DNA, 201 bp, Homo sapiens; identical to SEQ ID NO: 8116

SEQ ID NO: 8268 - DNA, 201 bp, Homo sapiens; identical to SEQ ID NO: 8145

SEQ ID NO: 8269 - DNA, 201 bp, Homo sapiens; identical to SEQ ID NO: 8146

SEQ ID NO: 8270 - DNA, 201 bp, Homo sapiens; identical to SEQ ID NO: 8147

SEQ ID NO: 8271 - DNA, 201 bp, Homo sapiens; identical to SEQ ID NO: 8148

SEQ ID NO: 8272 - DNA, 201 bp, Homo sapiens; identical to SEQ ID NO: 8149

SEQ ID NO: 8273 - DNA, 201 bp, Homo sapiens; identical to SEQ ID NO: 8150
  misc_feature (1)...(201): n = A,T,C or G, or insertion/deletion polymorphism (see Tables 1-2)

SEQ ID NO: 8274 - DNA, 201 bp, Homo sapiens; identical to SEQ ID NO: 8118

SEQ ID NO: 8275 - DNA, 201 bp, Homo sapiens; identical to SEQ ID NO: 8152

SEQ ID NO: 8276 - DNA, 201 bp, Homo sapiens; identical to SEQ ID NO: 8153

SEQ ID NO: 8277 - DNA, 201 bp, Homo sapiens; identical to SEQ ID NO: 8113

SEQ ID NO: 8278 - DNA, 201 bp, Homo sapiens; identical to SEQ ID NO: 8155

SEQ ID NO: 8279 - DNA, 201 bp, Homo sapiens; identical to SEQ ID NO: 8156

SEQ ID NO: 8280 - DNA, 201 bp, Homo sapiens; identical to SEQ ID NO: 8157

SEQ ID NO: 8281 - DNA, 201 bp, Homo sapiens; identical to SEQ ID NO: 8158

SEQ ID NO: 8282 - DNA, 201 bp, Homo sapiens
acccagctggcatgcaataacaaggctgcagacggtgactggccctggcttcctgggtggcggtgcggactgatgtggagatgtgacagccccgatgagcwcctggctggctgcagggtcctacctctgggtttcctggaagtggatttgggccaagaaggagagggagaaaggcccgagcccctgccttcccgggccttt

SEQ ID NO: 8283 - DNA, 201 bp, Homo sapiens
gcttcctgggtggcggtgcggactgatgtggagatgtgacagccccgatgagcacctggctggctgcagggtcctacctctgggtttcctggaagtggatytgggccaagaaggagagggagaaaggcccgagcccctgccttcccgggcctttctctcctgggctgtctctggtctggtcagcctggctctcgggaaatt

SEQ ID NO: 8284 - DNA, 201 bp, Homo sapiens
ggaaatacaccgaaggcgtggatgaagccgatccggccaagtggaaggccaacctgcgctgtgcccttaacaagagccgggacttccgcctcatctacgaygggccccgggacatgccacctcagccctacaagatctacgaggtctgctccaatggccctgctcccacagactcccagccccctgaggattactcttttg

SEQ ID NO: 8285 - DNA, 201 bp, Homo sapiens
cacatgacaccctattctttactcaaagaggatgtcaagtggccgcccactctgcagccgcccactctgcggccgcctactctgcagccgcccactctgcrgccgcccgtggtgctgggtccccctgctccagaccccagccccctggctcctccccctggcaaccctgctggcttcagggagcttctctctgaggtcctg

SEQ ID NO: 8286 - DNA, 201 bp, Homo sapiens
gccctgaggacatccccagtgacaagcagcgcttctacacgaaccagctgctggatgtcctggaccgcgggctcatcctccagctacagggccaggacctktatgccatccgcctgtgtcagtgcaaggtgttctggagcgggccttgtgcctcagcccatgactcatgccccaaccccatccagcgggaggtcaagacca

SEQ ID NO: 8287 - DNA, 201 bp, Homo sapiens; identical to SEQ ID NO: 8282

SEQ ID NO: 8288 - DNA, 201 bp, Homo sapiens; identical to SEQ ID NO: 8283

SEQ ID NO: 8289 - DNA, 201 bp, Homo sapiens; identical to SEQ ID NO: 8284

SEQ ID NO: 8290 - DNA, 201 bp, Homo sapiens
aggatgttgccaagcctgagcctcacagaggatgtcaagtggccgcccactctgcagccgcccactctgcggccgcctactctgcagccgcccactctgcrgccgcccgtggtgctgggtccccctgctccagaccccagccccctggctcctccccctggcaaccctgctggcttcagggagcttctctctgaggtcctg

SEQ ID NO: 8291 - DNA, 201 bp, Homo sapiens; identical to SEQ ID NO: 8286

SEQ ID NO: 8292 - DNA, 201 bp, Homo sapiens; identical to SEQ ID NO: 8282

SEQ ID NO: 8293 - DNA, 201 bp, Homo sapiens; identical to SEQ ID NO: 8283

SEQ ID NO: 8294 - DNA, 201 bp, Homo sapiens; identical to SEQ ID NO: 8284

SEQ ID NO: 8295 - DNA, 201 bp, Homo sapiens; identical to SEQ ID NO: 8285

SEQ ID NO: 8296 - DNA, 201 bp, Homo sapiens; identical to SEQ ID NO: 8286

SEQ ID NO: 8297 - DNA, 201 bp, Homo sapiens; identical to SEQ ID NO: 8282

SEQ ID NO: 8298 - DNA, 201 bp, Homo sapiens; identical to SEQ ID NO: 8283

SEQ ID NO: 8299 - DNA, 201 bp, Homo sapiens; identical to SEQ ID NO: 8284

SEQ ID NO: 8300 - DNA, 201 bp, Homo sapiens; identical to SEQ ID NO: 8290

SEQ ID NO: 8301 - DNA, 201 bp, Homo sapiens; identical to SEQ ID NO: 8286

SEQ ID NO: 8302 - DNA, 201 bp, Homo sapiens; identical to SEQ ID NO: 8282

SEQ ID NO: 8303 - DNA, 201 bp, Homo sapiens; identical to SEQ ID NO: 8283

SEQ ID NO: 8304 - DNA, 201 bp, Homo sapiens; identical to SEQ ID NO: 8284

SEQ ID NO: 8305 - DNA, 201 bp, Homo sapiens
ttttggtgcaggagaggaggaggaagaagaggaagagctgcagaggatgttgccaagcctgagcctcacaggccgcctactctgcagccgcccactctgcrgccgcccgtggtgctgggtccccctgctccagaccccagccccctggctcctccccctggcaaccctgctggcttcagggagcttctctctgaggtcctg

SEQ ID NO: 8306 - DNA, 201 bp, Homo sapiens; identical to SEQ ID NO: 8286

SEQ ID NO: 8307 - DNA, 201 bp, Homo sapiens; identical to SEQ ID NO: 8282

SEQ ID NO: 8308 - DNA, 201 bp, Homo sapiens; identical to SEQ ID NO: 8283

SEQ ID NO: 8309 - DNA, 201 bp, Homo sapiens; identical to SEQ ID NO: 8284

SEQ ID NO: 8310 - DNA, 201 bp, Homo sapiens
gagcctcacagatgcagtgcagtctggcccccacatgacaccctattctttactcaaagaggatgtcaacggccgcctactctgcagccgcccactctgcrgccgcccgtggtgctgggtccccctgctccagaccccagccccctggctcctccccctggcaaccctgctggcttcagggagcttctctctgaggtcctg

SEQ ID NO: 8311 - DNA, 201 bp, Homo sapiens; identical to SEQ ID NO: 8286

SEQ ID NO: 8312 - DNA, 201 bp, Homo sapiens
caaacacattcggagcaattcaatatgcaagaaaatatgcttattcagcagcttctggtgggcgacgaagtgctacgaaagtaatggtagttgtaactgayggtgaatcacatgatggttcaatgttgaaagctgtgattgatcaatgcaaccatgacaatatactgaggtttggcatagcagttcttgggtacttaaaca

SEQ ID NO: 8313 - DNA, 201 bp, Homo sapiens
ggataaagacaccattacagacgtgctcttggtaggtgcaccaatgtacatgagtgacctaaagaaagaggaaggaagagtctacctgtttactatcaaaragggcattttgggtcagcaccaatttcttgaaggccccgagggcattgaaaacactcgatttggttcagcaattgcagctctttcagacatcaacatgga

SEQ ID NO: 8314 - DNA, 201 bp, Homo sapiens
atccaagagttgtgtttaacttgaacacatataaaaccaaagaagaaatgattgtagcaacatcccagacatcccaatatggtggggacctcacaaacacmttcggagcaattcaatatgcaagaaaatatgcttattcagcagcttctggtgggcgacgaagtgctacgaaagtaatggtagttgtaactgacggtgaat

SEQ ID NO: 8315 - DNA, 201 bp, Homo sapiens
gcatttctgatctagtcctagatgtccgacaaataccagctgctcaagaacaaccctttattgtcagcaaccaaaacaaaaggttaacattttcagtaacrctgaaaaataaaagggaaagtgcatacaacactggaattgttgttgatttttcagaaaacttgttttttgcatcattctccctgccggttgatgggacag

SEQ ID NO: 8316 - DNA, 201 bp, Homo sapiens
gctcgagtgaatttctaaatgttggaatgttatgggatgtaaacaatgtaaagtaagacatctcaggatttcaccagaagttacagatgaggcactggaarccaccaaattagcaggtgcaccttctgtggctgtcttgtttctgaagtacttaaacttccacaagagtgaatttgacctaggcaagtttgttcaaaaggt

SEQ ID NO: 8317 - DNA, 201 bp, Homo sapiens
cagggagctattttcatttagtgctaaacaagtaagaaaaataagctcgagtgaatttctaaatgttggaatgttatgggatgtaaacaatgtaaagtaaracatctcaggatttcaccagaagttacagatgaggcactggaagccaccaaattagcaggtgcaccttctgtggctgtcttgtttctgaagtacttaaac

SEQ ID NO: 8318 - DNA, 201 bp, Homo sapiens
atctgtttaatttacacacttgcatgaattactgtatataaactccttaacttcagggagctattttcatttagtgctaaacaagtaagaaaaataagctmgagtgaatttctaaatgttggaatgttatgggatgtaaacaatgtaaagtaagacatctcaggatttcaccagaagttacagatgaggcactggaagcca

SEQ ID NO: 8319 - DNA, 201 bp, Homo sapiens
aatgcaaccatgacaatatactgaggtttggcatagcagttcttgggtacttaaacagaaacgcccttgatactaaaaatttaataaaagaaataaaagcratcgctagtattccaacagaaagatactttttcaatgtgtctgatgaagcagctctactagaaaaggctgggacattaggagaacaaattttcagcattg

SEQ ID NO: 8320 - DNA, 201 bp, Homo sapiens
tttttcaatttatgctgctcatccaaagttgccacagatgatacttccaagtgataattttatttataaactaggtaaaatttgttgttggttccttttakaccacggctgccccttccacaccccatcttgctctaatgatcaaaacatgcttgaataactgagcttagagtatacctcctatatgtccatttaagttag

SEQ ID NO: 8321 - DNA, 201 bp, Homo sapiens
catcccaatatggtggggacctcacaaacacattcggagcaattcaatatgcaagaaaatatgcttattcagcagcttctggtgggcgacgaagtgctacraaagtaatggtagttgtaactgacggtgaatcacatgatggttcaatgttgaaagctgtgattgatcaatgcaaccatgacaatatactgaggtttggca

SEQ ID NO: 8322 - DNA, 201 bp, Homo sapiens
tgtgtgatgaatcaaatagtatttatccttgggatgcagtaaagaattttttggaaaaatttgtacaaggcctggatataggccccacaaagacacaggtrgggttaattcagtatgccaataatccaagagttgtgtttaacttgaacacatataaaaccaaagaagaaatgattgtagcaacatcccagacatcccaat

SEQ ID NO: 8323 - DNA, 201 bp, Homo sapiens
tggagctgtatacatttacaatggtcatcagggcactatccgcacaaagtattcccagaaaatcttgggatccgatggagcctttaggagccatctccagkactttgggaggtccttggatggctatggagatttaaatggggattccatcaccgatgtgtctattggtgcctttggacaagtggttcaactctggtcaca

SEQ ID NO: 8324 - DNA, 201 bp, Homo sapiens
tattcttgtaaaatagttacctattaaaactgtgaagagtaaaactaaagccaatttattatagtcacacaagtgattatactaaaaattattataaaggktataattttataatgtatttacctgtcctgatatatagctataacccaatatatgaaaatctcaaaaattaagacatcatcatacagaaggcaggattcc

SEQ ID NO: 8325 - DNA, 103 bp, Homo sapiens
aatagataagtcttttttcaaatgtggtgtttgatgtttttgattaaatgtgttttgcctctttccacaaaaactgtaaaaataaatgcatgtttgtacamaa

SEQ ID NO: 8326 - DNA, 201 bp, Homo sapiens
acatcagtctggaaaaccctggcactagccctgcccttgaagcctattctgagactgccaaggtcttcagtattcctttccacaaagactgtggtgaggayggactttgcatttctgatctagtcctagatgtccgacaaataccagctgctcaagaacaaccctttattgtcagcaaccaaaacaaaaggttaacatttt

SEQ ID NO: 8327 - DNA, 201 bp, Homo sapiens
tttgttaatgtgactaccagaatttggaacgggactttcgcatcatcaacgttccagacagtacagctaacggcagctgcagaaatcaacacctataaccytgagatatatgtgattgaagataacactgttacgattcccctgatgataatgaaacctgatgagaaagccgaagtaccaacaggagttataataggaagt

SEQ ID NO: 8328 - DNA, 201 bp, Homo sapiens
ccagaggaaggaaaaggaggaaatttcctttctcttttaggaggcacaacagttctcttctaggatttgtttggctgactggcagtaacctagtgaatttytgaaagatgagtaatttctttggcaaccttcctcctcccttactgaaccactctcccacctcctggtggtaccattattatagaagccctctacagcctg

SEQ ID NO: 8329 - DNA, 201 bp, Homo sapiens
taacattttcagtaacgctgaaaaataaaagggaaagtgcatacaacactggaattgttgttgatttttcagaaaacttgttttttgcatcattctccctrccggttgatgggacagaagtaacatgccaggtggctgcatctcagaagtctgttgcctgcgatgtaggctaccctgctttaaagagagaacaacaggtga

SEQ ID NO: 8330 - DNA, 201 bp, Homo sapiens
aactttgacttcaatcttcaaaaccttcagaatcaggcgtctctcagtttccaagccttaagtgaaagccaagaagaaaacaaggctgataatttggtcarcctcaaaattcctctcctgtatgatgctgaaattcacttaacaagatctaccaacataaatttttatgaaatctcttcggatgggaatgttccttcaatc

SEQ ID NO: 8331 - DNA, 201 bp, Homo sapiens
gaactgcttcctgtagtaatgttacctgctggttgaaagacgttcacatgaaaggagaatactttgttaatgtgactaccagaatttggaacgggactttygcatcatcaacgttccagacagtacagctaacggcagctgcagaaatcaacacctataaccctgagatatatgtgattgaagataacactgttacgattc

SEQ ID NO: 8332 - DNA, 201 bp, Homo sapiens
aacccgggaggcagaggtttcagtgagccgagatcgcgccactgcactccagcctgggtgacagggcaagactctgtctcaaacaaacaaacaaaaaaaaagttagtactgtatatgtaaatactagcttttcaatgtgctatacaaacaattatagcacatccttccttttactctgtctcacctcctttaggtgagtac

SEQ ID NO: 8333 - DNA, 201 bp, Homo sapiens
gaacccgggaggcagaggtttcagtgagccgagatcgcgccactgcactccagcctgggtgacagggcaagactctgtctcaaacaaacaaacaaaaaaaaagttagtactgtatatgtaaatactagcttttcaatgtgctatacaaacaattatagcacatccttccttttactctgtctcacctcctttaggtgagta

SEQ ID NO: 8334 - DNA, 201 bp, Homo sapiens
tttaaataaaagctatgtgttcctattcaacaatatttttgctttaaaagtaagtagagggcataaaagatgtcatattcaaatttccatttcataaatgrtgtacagacaaggtctatagaatgtggtaaaaacttgactgcaacacaaggcttataaaatagtaagatagtaaaatagcttatgaagaaactacagaga

SEQ ID NO: 8335 - DNA, 201 bp, Homo sapiens
tgaacccgggaggcagaggtttcagtgagccgagatcgcgccactgcactccagcctgggtgacagggcaagactctgtctcaaacaaacaaacaaaaaaaaagttagtactgtatatgtaaatactagcttttcaatgtgctatacaaacaattatagcacatccttccttttactctgtctcacctcctttaggtgagt

SEQ ID NO: 8336 - DNA, 201 bp, Homo sapiens
agcatgctccccccgcagtcatgacaatcaaaaaatgtctccagacattgtcaaatgcctcctggggggcagtatttctcaagcacttttaagcaaaggtragtattcatacaagaaatttagggggaaaaaacattgtttaaataaaagctatgtgttcctattcaacaatatttttgctttaaaagtaagtagagggca

SEQ ID NO: 8337 - DNA, 201 bp, Homo sapiens
aatcacttgaacccgggaggcagaggtttcagtgagccgagatcgcgccactgcactccagcctgggtgacagggcaagactctgtctcaaacaaacaaacaaaaaaaaagttagtactgtatatgtaaatactagcttttcaatgtgctatacaaacaattatagcacatccttccttttactctgtctcacctccttta

SEQ ID NO: 8338 - DNA, 201 bp, Homo sapiens
tcctggcctctagctacccgatgccagagcatgctccccccgcagtcatgacaatcaaaaaatgtctccagacattgtcaaatgcctcctggggggcagtrtttctcaagcacttttaagcaaaggtaagtattcatacaagaaatttagggggaaaaaacattgtttaaataaaagctatgtgttcctattcaacaatat

SEQ ID NO: 8339 - DNA, 201 bp, Homo sapiens
tggtattctccagttaggtatgccagagtccaattcttttaacagctgtgagaatttgctgcttcattccaacaaaattttatttaaaaaaaaaaaaaaaagactggagaaactagtcattagcttgataaagaatatttaacagctagtggtgctggtgtgtacctgaagctccagctacttgagagactgagacaggaa

SEQ ID NO: 8340 - DNA, 201 bp, Homo sapiens
gggctgtcctgtaccttgtaggacagcagccctgtcctagaaggtatgtttagcagcattcctggcctctagctacccgatgccagagcatgctccccccrcagtcatgacaatcaaaaaatgtctccagacattgtcaaatgcctcctggggggcagtatttctcaagcacttttaagcaaaggtaagtattcatacaag

SEQ ID NO: 8341 - DNA, 201 bp, Homo sapiens
caagagttgtgtttaacttgaacacatataaaaccaaagaagaaatgattgtagcaacatcccagacatcccaatatggtggggacctcacaaacacattyggagcaattcaatatgcaagaaaatatgcttattcagcagcttctggtgggcgacgaagtgctacgaaagtaatggtagttgtaactgacggtgaatcac

SEQ ID NO: 8342 - DNA, 201 bp, Homo sapiens
agctggagttcagcagtgatgcttttagttttaaaagtctatgatctggacttcctataatacaaatacacaatcctccaagaatttgacttggaaaaaaatgtcaaaggaaaacaggttatctgcccatgtgcatatggacaaccttgactaccctggcctggcccgtggtggcagtccagggctatctgtactgtttac

SEQ ID NO: 8343 - DNA, 201 bp, Homo sapiens
ggggctgtcctgtaccttgtaggacagcagccctgtcctagaaggtatgtttagcagcattcctggcctctagctacccgatgccagagcatgctcccccygcagtcatgacaatcaaaaaatgtctccagacattgtcaaatgcctcctggggggcagtatttctcaagcacttttaagcaaaggtaagtattcatacaa

SEQ ID NO: 8344 - DNA, 201 bp, Homo sapiens
cactccagcctgggtgacagggcaagactctgtctcaaacaaacaaacaaaaaaaaagttagtactgtatatgtaaatactagcttttcaatgtgctatayaaacaattatagcacatccttccttttactctgtctcacctcctttaggtgagtacttccttaaataagtgctaaacatacatatacggaacttgaaagc

SEQ ID NO: 8345 - DNA, 201 bp, Homo sapiens
tgttgttggttccttttagaccacggctgccccttccacaccccatcttgctctaatgatcaaaacatgcttgaataactgagcttagagtatacctcctrtatgtccatttaagttaggagagggggcgatatagagactaaggcacaaaattttgtttaaaactcagaatataacatgtaaaatcccatctgctagaag

SEQ ID NO: 8346 - DNA, 201 bp, Homo sapiens
tgtggacgagccgaggtgcagcccgcggggccgcagggccggggtggggcggggcgcggcgggagcagatccggtgtttgcggaatcaggaggggcgggcyggggcgggccctcggcgctgcaggagctgcccagaaacttttccctgctctcaccgggcgggggagagaagccctctggacagcttctagagtgtgcagg

SEQ ID NO: 8347 - DNA, 201 bp, Homo sapiens
gctgggccgctgtacgggagccaaggtgcggtgccccgcgtgtggacgagccgaggtgcagcccgcggggccgcagggccggggtggggcggggcgcggcsggagcagatccggtgtttgcggaatcaggaggggcgggccggggcgggccctcggcgctgcaggagctgcccagaaacttttccctgctctcaccgggcg

SEQ ID NO: 8348 - DNA, 201 bp, Homo sapiens
aaaccaaagaagaaatgattgtagcaacatcccagacatcccaatatggtggggacctcacaaacacattcggagcaattcaatatgcaagaaaatatgcytattcagcagcttctggtgggcgacgaagtgctacgaaagtaatggtagttgtaactgacggtgaatcacatgatggttcaatgttgaaagctgtgattg

SEQ ID NO: 8349 - DNA, 201 bp, Homo sapiens
accccatcttgctctaatgatcaaaacatgcttgaataactgagcttagagtatacctcctatatgtccatttaagttaggagagggggcgatatagagamtaaggcacaaaattttgtttaaaactcagaatataacatgtaaaatcccatctgctagaagcccatcctgtgccagaggaaggaaaaggaggaaatttcc

SEQ ID NO: 8350 - DNA, 201 bp, Homo sapiens
ttcaaaagaaaatatgaaaagatgaccaaaaatccagatgagattgatgagaccacagagctcagtagctgaaccagcagacctacctgcagtgggaaccrgcagcatcccagccagggtttgctgtttgcgtgaatggatttctttttaaatcccatattttttttatcatgtcgtaggtaaactaacctggtattttaa

SEQ ID NO: 8351 - DNA, 149 bp, Homo sapiens
ttaaaactcagaatataacatgtaaaatcccatctgctagaagcccatcctgtgccagaggaagatttgtttggctgactggcagtaacctagtgaatttytgaaagatgagtaatttctttggcaaccttcctcctcccttactgaac

SEQ ID NO: 8352 - DNA, 201 bp, Homo sapiens; identical to SEQ ID NO: 8329

SEQ ID NO: 8353 - DNA, 201 bp, Homo sapiens; identical to SEQ ID NO: 8312

SEQ ID NO: 8354 - DNA, 201 bp, Homo sapiens; identical to SEQ ID NO: 8313

SEQ ID NO: 8355 - DNA, 201 bp, Homo sapiens; identical to SEQ ID NO: 8314

SEQ ID NO: 8356 - DNA, 201 bp, Homo sapiens; identical to SEQ ID NO: 8315

SEQ ID NO: 8357 - DNA, 201 bp, Homo sapiens; identical to SEQ ID NO: 8330

SEQ ID NO: 8358 - DNA, 201 bp, Homo sapiens; identical to SEQ ID NO: 8319

SEQ ID NO: 8359 - DNA, 201 bp, Homo sapiens; identical to SEQ ID NO: 8331

SEQ ID NO: 8360 - DNA, 201 bp, Homo sapiens; identical to SEQ ID NO: 8320

SEQ ID NO: 8361 - DNA, 201 bp, Homo sapiens; identical to SEQ ID NO: 8341

SEQ ID NO: 8362 - DNA, 201 bp, Homo sapiens; identical to SEQ ID NO: 8345

SEQ ID NO: 8363 - DNA, 201 bp, Homo sapiens; identical to SEQ ID NO: 8321

SEQ ID NO: 8364 - DNA, 201 bp, Homo sapiens; identical to SEQ ID NO: 8322

SEQ ID NO: 8365 - DNA, 201 bp, Homo sapiens; identical to SEQ ID NO: 8323

SEQ ID NO: 8366 - DNA, 201 bp, Homo sapiens; identical to SEQ ID NO: 8346

SEQ ID NO: 8367 - DNA, 201 bp, Homo sapiens; identical to SEQ ID NO: 8347

SEQ ID NO: 8368 - DNA, 201 bp, Homo sapiens; identical to SEQ ID NO: 8348

SEQ ID NO: 8369 - DNA, 201 bp, Homo sapiens; identical to SEQ ID NO: 8326

SEQ ID NO: 8370 - DNA, 201 bp, Homo sapiens
accccatcttgctctaatgatcaaaacatgcttgaataactgagcttagagtatacctcctatatgtccatttaagttaggagagggggcgatatagagamtaaggcacaaaattttgtttaaaactcagaatataacatgtaaaatcccatctgctagaagcccatcctgtgccagaggaagatttgtttggctgactgg

SEQ ID NO: 8371 - DNA, 201 bp, Homo sapiens; identical to SEQ ID NO: 8350

SEQ ID NO: 8372 - DNA, 201 bp, Homo sapiens; identical to SEQ ID NO: 8327

SEQ ID NO: 8373 - DNA, 201 bp, Homo sapiens
gtggtttcaggatatctgaagaaaatgaaacaacatgctacatgggaaaatggagttctccacctcagtgtgaaggccttccttgtaaatctccacctgakatttctcatggtgttgtagctcacatgtcagacagttatcagtatggagaagaagttacgtacaaatgttttgaaggttttggaattgatgggcctgcaa

SEQ ID NO: 8374 - DNA, 201 bp, Homo sapiens
gcataaaaacagattgtctcagtttacctagctttgaaaatgccatacccatgggagagaagaaggatgtgtataaggcgggtgagcaagtgacttacacwtgtgcaacatattacaaaatggatggagccagtaatgtaacatgcattaatagcagatggacaggaaggccaacatgcagagacacctcctgtgtgaatc

SEQ ID NO: 8375 - DNA, 201 bp, Homo sapiens
atttctgaatctcagtatacatatgccttaaaagaaaaagcgaaatatcaatgcaaactaggatatgtaacagcagatggtgaaacatcaggatcaattasatgtgggaaagatggatggtcagctcaacccacgtgcattaaatcttgtgatatcccagtatttatgaatgccagaactaaaaatgacttcacatggttt

SEQ ID NO: 8376 - DNA, 201 bp, Homo sapiens
tgagtaaatatccatctggtgagagagtacgttatcaatgtaggagcccttatgaaatgtttggggatgaagaagtgatgtgtttaaatggaaactggacrgaaccacctcaatgcaaagattctacaggaaaatgtgggccccctccacctattgacaatggggacattacttcattcccgttgtcagtatatgctccag

SEQ ID NO: 8377 - DNA, 201 bp, Homo sapiens
aaatacagaaattctgacaggttcctggtctgaccaaacatatccagaaggcacccaggctatctataaatgccgccctggatatagatctcttggaaatrtaataatggtatgcaggaagggagaatgggttgctcttaatccattaaggaaatgtcagaaaaggccctgtggacatcctggagatactccttttggtac

SEQ ID NO: 8378 - DNA, 201 bp, Homo sapiens
ctgggatcacattcattgcacacaagatggatggtcgccagcagtaccatgcctcagaaaatgttattttccttatttggaaaatggatataatcaaaatyatggaagaaagtttgtacagggtaaatctatagacgttgcctgccatcctggctacgctcttccaaaagcgcagaccacagttacatgtatggagaatgg

SEQ ID NO: 8379 - DNA, 201 bp, Homo sapiens
atgcagagacacctcctgtgtgaatccgcccacagtacaaaatgcttatatagtgtcgagacagatgagtaaatatccatctggtgagagagtacgttatsaatgtaggagcccttatgaaatgtttggggatgaagaagtgatgtgtttaaatggaaactggacggaaccacctcaatgcaaagattctacaggaaaatg

SEQ ID NO: 8380 - DNA, 201 bp, Homo sapiens
agccagtaatgtaacatgcattaatagcagatggacaggaaggccaacatgcagagacacctcctgtgtgaatccgcccacagtacaaaatgcttatatastgtcgagacagatgagtaaatatccatctggtgagagagtacgttatcaatgtaggagcccttatgaaatgtttggggatgaagaagtgatgtgtttaaa

SEQ ID NO: 8381 - DNA, 201 bp, Homo sapiens
acatgtagaaatggacaatggtcagaaccaccaaaatgcttacatccgtgtgtaatatcccgagaaattatggaaaattataacatagcattaaggtggasagccaaacagaagctttattcgagaacaggtgaatcagttgaatttgtgtgtaaacggggatatcgtctttcatcacgttctcacacattgcgaacaaca

SEQ ID NO: 8382 - DNA, 201 bp, Homo sapiens
ggaatgttaaggaaaaaacgaaagaagaatatggacacagtgaagtggtggaatattattgcaatcctagatttctaatgaagggacctaataaaattcartgtgttgatggagagtggacaactttaccagtgtgtattgtggaggagagtacctgtggagatatacctgaacttgaacatggctgggcccagctttctt

SEQ ID NO: 8383 - DNA, 201 bp, Homo sapiens
ggatggagccagtaatgtaacatgcattaatagcagatggacaggaaggccaacatgcagagacacctcctgtgtgaatccgcccacagtacaaaatgctyatatagtgtcgagacagatgagtaaatatccatctggtgagagagtacgttatcaatgtaggagcccttatgaaatgtttggggatgaagaagtgatgtg

SEQ ID NO: 8384 - DNA, 111 bp, Homo sapiens
tttactcctttttattcatacgtaaaattttggattaatttgtgaaaatgtaattataagctgagaccggtggctctcttcttaaaagcaccatattaaawcctggaaaac

SEQ ID NO: 8385 - DNA, 201 bp, Homo sapiens
aaaaattgtcagtagtgcaatggaaccagatcgggaataccattttggacaagcagtacggtttgtatgtaactcaggctacaagattgaaggagatgaakaaatgcattgttcagacgatggtttttggagtaaagagaaaccaaagtgtgtggaaatttcatgcaaatccccagatgttataaatggatctcctatatc

SEQ ID NO: 8386 - DNA, 201 bp, Homo sapiens
ataacatgtagaaatggacaatggtcagaaccaccaaaatgcttacatccgtgtgtaatatcccgagaaattatggaaaattataacatagcattaaggtkgacagccaaacagaagctttattcgagaacaggtgaatcagttgaatttgtgtgtaaacggggatatcgtctttcatcacgttctcacacattgcgaaca

SEQ ID NO: 8387 - DNA, 201 bp, Homo sapiens
aaggtggacagccaaacagaagctttattcgagaacaggtgaatcagttgaatttgtgtgtaaacggggatatcgtctttcatcacgttctcacacattgsgaacaacatgttgggatgggaaactggagtatccaacttgtgcaaaaagatagaatcaatcataaatattgttttactcctttttattcatacgtaaaat

SEQ ID NO: 8388 - DNA, 138 bp, Homo sapiens
aattcttggaagaggagaactggacgttgtgaacagasttagctggtaaatgtcctcttaaaagatccaaaaaatgagacttctagcaaagattatttgccttatgttatgggctatttgtgtagcagaagattgcaa

SEQ ID NO: 8389 - DNA, 201 bp, Homo sapiens
cttaggagaaaaatggtctcaccctccatcatgcataaaaacagattgtctcagtttacctagctttgaaaatgccatacccatgggagagaagaaggatktgtataaggcgggtgagcaagtgacttacacttgtgcaacatattacaaaatggatggagccagtaatgtaacatgcattaatagcagatggacaggaag

SEQ ID NO: 8390 - DNA, 201 bp, Homo sapiens
atgggatccagaagtgaactgctcaatggcacaaatacaattatgcccacctccacctcagattcccaattctcacaatatgacaaccacactgaattatygggatggagaaaaagtatctgttctttgccaagaaaattatctaattcaggaaggagaagaaattacatgcaaagatggaagatggcagtcaataccact

SEQ ID NO: 8391 - DNA, 201 bp, Homo sapiens
gatggacaggaaggccaacatgcagagacacctcctgtgtgaatccgcccacagtacaaaatgcttatatagtgtcgagacagatgagtaaatatccatcyggtgagagagtacgttatcaatgtaggagcccttatgaaatgtttggggatgaagaagtgatgtgtttaaatggaaactggacggaaccacctcaatgca

SEQ ID NO: 8392 - DNA, 201 bp, Homo sapiens
agatggcagtcaataccactctgtgttgaaaaaattccatgttcacaaccacctcagatagaacacggaaccattaattcatccaggtcttcacaagaaakttatgcacatgggactaaattgagttatacttgtgagggtggtttcaggatatctgaagaaaatgaaacaacatgctacatgggaaaatggagttctcca

SEQ ID NO: 8393 - DNA, 201 bp, Homo sapiens
tttcttcccctccttattactatggagattcagtggaattcaattgctcagaatcatttacaatgattggacacagatcaattacgtgtattcatggagtmtggacccaacttccccagtgtgtggcaatagataaacttaagaagtgcaaatcatcaaatttaattatacttgaggaacatttaaaaaacaagaaggaat

SEQ ID NO: 8394 - DNA, 201 bp, Homo sapiens
ttacatccgtgtgtaatatcccgagaaattatggaaaattataacatagcattaaggtggacagccaaacagaagctttattcgagaacaggtgaatcagytgaatttgtgtgtaaacggggatatcgtctttcatcacgttctcacacattgcgaacaacatgttgggatgggaaactggagtatccaacttgtgcaaaa

SEQ ID NO: 8395 - DNA, 201 bp, Homo sapiens
gatgaagaagtgatgtgtttaaatggaaactggacggaaccacctcaatgcaaagattctacaggaaaatgtgggccccctccacctattgacaatggggrcattacttcattcccgttgtcagtatatgctccagcttcatcagttgagtaccaatgccagaacttgtatcaacttgagggtaacaagcgaataacatgt

SEQ ID NO: 8396 - DNA, 201 bp, Homo sapiens
caatggtcagaaccaccaaaatgcttacatccgtgtgtaatatcccgagaaattatggaaaattataacatagcattaaggtggacagccaaacagaagckttattcgagaacaggtgaatcagttgaatttgtgtgtaaacggggatatcgtctttcatcacgttctcacacattgcgaacaacatgttgggatgggaaa

SEQ ID NO: 8397 - DNA, 201 bp, Homo sapiens
acccacgtgcattaaatcttgtgatatcccagtatttatgaatgccagaactaaaaatgacttcacatggtttaagctgaatgacacattggactatgaaygccatgatggttatgaaagcaatactggaagcaccactggttccatagtgtgtggttacaatggttggtctgatttacccatatgttatgaaagagaatg

SEQ ID NO: 8398 - DNA, 201 bp, Homo sapiens
tgtgaaggccttccttgtaaatctccacctgagatttctcatggtgttgtagctcacatgtcagacagttatcagtatggagaagaagttacgtacaaatrttttgaaggttttggaattgatgggcctgcaattgcaaaatgcttaggagaaaaatggtctcaccctccatcatgcataaaaacagattgtctcagttta

SEQ ID NO: 8399 - DNA, 201 bp, Homo sapiens
tacgttatcaatgtaggagcccttatgaaatgtttggggatgaagaagtgatgtgtttaaatggaaactggacggaaccacctcaatgcaaagattctacrggaaaatgtgggccccctccacctattgacaatggggacattacttcattcccgttgtcagtatatgctccagcttcatcagttgagtaccaatgccaga

SEQ ID NO: 8400 - DNA, 201 bp, Homo sapiens
tgcataaaaacagattgtctcagtttacctagctttgaaaatgccatacccatgggagagaagaaggatgtgtataaggcgggtgagcaagtgacttacayttgtgcaacatattacaaaatggatggagccagtaatgtaacatgcattaatagcagatggacaggaaggccaacatgcagagacacctcctgtgtgaat

SEQ ID NO: 8401 - DNA, 201 bp, Homo sapiens
atggtgactactcacctttaaggattaaacacagaactggagatgaaatcacgtaccagtgtagaaatggtttttatcctgcaacccggggaaatacagcmaaatgcacaagtactggctggatacctgctccgagatgtaccttgaaaccttgtgattatccagacattaaacatggaggtctatatcatgagaatatgc

SEQ ID NO: 8402 - DNA, 201 bp, Homo sapiens
aatttgtgtgtaaacggggatatcgtctttcatcacgttctcacacattgcgaacaacatgttgggatgggaaactggagtatccaacttgtgcaaaaagrtagaatcaatcataaatattgttttactcctttttattcatacgtaaaattttggattaatttgtgaaaatgtaattataagctgagaccggtggctctc

SEQ ID NO: 8403 - DNA, 201 bp, Homo sapiens
ggtggacagccaaacagaagctttattcgagaacaggtgaatcagttgaatttgtgtgtaaacggggatatcgtctttcatcacgttctcacacattgcgwacaacatgttgggatgggaaactggagtatccaacttgtgcaaaaagatagaatcaatcataaatattgttttactcctttttattcatacgtaaaattt

SEQ ID NO: 8404 - DNA, 201 bp, Homo sapiens
cccgagaaattatggaaaattataacatagcattaaggtggacagccaaacagaagctttattcgagaacaggtgaatcagttgaatttgtgtgtaaacgkggatatcgtctttcatcacgttctcacacattgcgaacaacatgttgggatgggaaactggagtatccaacttgtgcaaaaagatagaatcaatcataaa

SEQ ID NO: 8405 - DNA, 201 bp, Homo sapiens
tcagaaccaccaaaatgcttacatccgtgtgtaatatcccgagaaattatggaaaattataacatagcattaaggtggacagccaaacagaagctttattygagaacaggtgaatcagttgaatttgtgtgtaaacggggatatcgtctttcatcacgttctcacacattgcgaacaacatgttgggatgggaaactggag

SEQ ID NO: 8406 - DNA, 201 bp, Homo sapiens
ccagatgcatccgtgtcaaaacatgttccaaatcaagtatagatattgagaatgggtttatttctgaatctcagtatacatatgccttaaaagaaaaagcraaatatcaatgcaaactaggatatgtaacagcagatggtgaaacatcaggatcaattacatgtgggaaagatggatggtcagctcaacccacgtgcatta

SEQ ID NO: 8407 - DNA, 201 bp, Homo sapiens
ccacctcagtgtgaaggccttccttgtaaatctccacctgagatttctcatggtgttgtagctcacatgtcagacagttatcagtatggagaagaagttaygtacaaatgttttgaaggttttggaattgatgggcctgcaattgcaaaatgcttaggagaaaaatggtctcaccctccatcatgcataaaaacagattgt

SEQ ID NO: 8408 - DNA, 201 bp, Homo sapiens
atagataaacttaagaagtgcaaatcatcaaatttaattatacttgaggaacatttaaaaaacaagaaggaattcgatcataattctaacataaggtacakatgtagaggaaaagaaggatggatacacacagtctgcataaatggaagatgggatccagaagtgaactgctcaatggcacaaatacaattatgcccacct

SEQ ID NO: 8409 - DNA, 201 bp, Homo sapiens
aagtgacttacacttgtgcaacatattacaaaatggatggagccagtaatgtaacatgcattaatagcagatggacaggaaggccaacatgcagagacacytcctgtgtgaatccgcccacagtacaaaatgcttatatagtgtcgagacagatgagtaaatatccatctggtgagagagtacgttatcaatgtaggagcc

SEQ ID NO: 8410 - DNA, 201 bp, Homo sapiens; identical to SEQ ID NO: 8373

SEQ ID NO: 8411 - DNA, 201 bp, Homo sapiens
aaactggagtatccaacttgtgcaaaaagatagaatcaatcataaagtgcacacctttattcagaactttagtattaaatcagttctcaatttcatttttwatgtattgttttactcctttttattcatacgtaaaattttggattaatttgtgaaaatgtaattataagctgagaccggtggctctcttcttaaaagcac

SEQ ID NO: 8412 - DNA, 201 bp, Homo sapiens; identical to SEQ ID NO: 8374

SEQ ID NO: 8413 - DNA, 201 bp, Homo sapiens; identical to SEQ ID NO: 8375

SEQ ID NO: 8414 - DNA, 201 bp, Homo sapiens; identical to SEQ ID NO: 8376

SEQ ID NO: 8415 - DNA, 201 bp, Homo sapiens; identical to SEQ ID NO: 8377

SEQ ID NO: 8416 - DNA, 201 bp, Homo sapiens; identical to SEQ ID NO: 8378

SEQ ID NO: 8417 - DNA, 201 bp, Homo sapiens; identical to SEQ ID NO: 8379

SEQ ID NO: 8418 - DNA, 201 bp, Homo sapiens; identical to SEQ ID NO: 8380

SEQ ID NO: 8419 - DNA, 201 bp, Homo sapiens; identical to SEQ ID NO: 8381

SEQ ID NO: 8420 - DNA, 201 bp, Homo sapiens; identical to SEQ ID NO: 8382

SEQ ID NO: 8421 - DNA, 201 bp, Homo sapiens; identical to SEQ ID NO: 8383

SEQ ID NO: 8422 - DNA, 114 bp, Homo sapiens
tttactcctttttattcatacgtaaaattttggattaatttgtgaaaatgtaattataagctgagaccggtggctctcttcttaaaagcaccatattaaawcctggaaaactaa

SEQ ID NO: 8423 - DNA, 201 bp, Homo sapiens; identical to SEQ ID NO: 8385

SEQ ID NO: 8424 - DNA, 201 bp, Homo sapiens; identical to SEQ ID NO: 8386

SEQ ID NO: 8425 - DNA, 201 bp, Homo sapiens
aaggtggacagccaaacagaagctttattcgagaacaggtgaatcagttgaatttgtgtgtaaacggggatatcgtctttcatcacgttctcacacattgsgaacaacatgttgggatgggaaactggagtatccaacttgtgcaaaaagatagaatcaatcataaagtgcacacctttattcagaactttagtattaaat

SEQ ID NO: 8426 - DNA, 201 bp, Homo sapiens
tctttcatcacgttctcacacattgcgaacaacatgttgggatgggaaactggagtatccaacttgtgcaaaaagatagaatcaatcataaagtgcacacytttattcagaactttagtattaaatcagttctcaatttcattttttatgtattgttttactcctttttattcatacgtaaaattttggattaatttgtga

SEQ ID NO: 8427 - DNA, 201 bp, Homo sapiens; identical to SEQ ID NO: 8389

SEQ ID NO: 8428 - DNA, 201 bp, Homo sapiens; identical to SEQ ID NO: 8390

SEQ ID NO: 8429 - DNA, 201 bp, Homo sapiens; identical to SEQ ID NO: 8391

SEQ ID NO: 8430 - DNA, 201 bp, Homo sapiens; identical to SEQ ID NO: 8392

SEQ ID NO: 8431 - DNA, 201 bp, Homo sapiens; identical to SEQ ID NO: 8393

SEQ ID NO: 8432 - DNA, 201 bp, Homo sapiens; identical to SEQ ID NO: 8394

SEQ ID NO: 8433 - DNA, 201 bp, Homo sapiens; identical to SEQ ID NO: 8395

SEQ ID NO: 8434 - DNA, 201 bp, Homo sapiens; identical to SEQ ID NO: 8396

SEQ ID NO: 8435 - DNA, 201 bp, Homo sapiens; identical to SEQ ID NO: 8397

SEQ ID NO: 8436 - DNA, 201 bp, Homo sapiens; identical to SEQ ID NO: 8398

SEQ ID NO: 8437 - DNA, 201 bp, Homo sapiens; identical to SEQ ID NO: 8399

SEQ ID NO: 8438 - DNA, 201 bp, Homo sapiens; identical to SEQ ID NO: 8400

SEQ ID NO: 8439 - DNA, 201 bp, Homo sapiens
ggatgggaaactggagtatccaacttgtgcaaaaagatagaatcaatcataaagtgcacacctttattcagaactttagtattaaatcagttctcaatttmattttttatgtattgttttactcctttttattcatacgtaaaattttggattaatttgtgaaaatgtaattataagctgagaccggtggctctcttctta

SEQ ID NO: 8440 - DNA, 201 bp, Homo sapiens; identical to SEQ ID NO: 8401

SEQ ID NO: 8441 - DNA, 201 bp, Homo sapiens
atgttgggatgggaaactggagtatccaacttgtgcaaaaagatagaatcaatcataaagtgcacacctttattcagaactttagtattaaatcagttctyaatttcattttttatgtattgttttactcctttttattcatacgtaaaattttggattaatttgtgaaaatgtaattataagctgagaccggtggctctc

SEQ ID NO: 8442 - DNA, 201 bp, Homo sapiens
ggatatcgtctttcatcacgttctcacacattgcgaacaacatgttgggatgggaaactggagtatccaacttgtgcaaaaagatagaatcaatcataaartgcacacctttattcagaactttagtattaaatcagttctcaatttcattttttatgtattgttttactcctttttattcatacgtaaaattttggatta

SEQ ID NO: 8443 - DNA, 201 bp, Homo sapiens
ggtggacagccaaacagaagctttattcgagaacaggtgaatcagttgaatttgtgtgtaaacggggatatcgtctttcatcacgttctcacacattgcgwacaacatgttgggatgggaaactggagtatccaacttgtgcaaaaagatagaatcaatcataaagtgcacacctttattcagaactttagtattaaatca

SEQ ID NO: 8444 - DNA, 201 bp, Homo sapiens; identical to SEQ ID NO: 8404

SEQ ID NO: 8445 - DNA, 201 bp, Homo sapiens; identical to SEQ ID NO: 8405

SEQ ID NO: 8446 - DNA, 201 bp, Homo sapiens; identical to SEQ ID NO: 8406

SEQ ID NO: 8447 - DNA, 201 bp, Homo sapiens; identical to SEQ ID NO: 8407

SEQ ID NO: 8448 - DNA, 201 bp, Homo sapiens; identical to SEQ ID NO: 8408

SEQ ID NO: 8449 - DNA, 201 bp, Homo sapiens; identical to SEQ ID NO: 8409

SEQ ID NO: 8450 - DNA, 201 bp, Homo sapiens; identical to SEQ ID NO: 8373

SEQ ID NO: 8451 - DNA, 201 bp, Homo sapiens; identical to SEQ ID NO: 8411

SEQ ID NO: 8452 - DNA, 201 bp, Homo sapiens; identical to SEQ ID NO: 8374

SEQ ID NO: 8453 - DNA, 201 bp, Homo sapiens; identical to SEQ ID NO: 8375

SEQ ID NO: 8454 - DNA, 201 bp, Homo sapiens; identical to SEQ ID NO: 8376

SEQ ID NO: 8455 - DNA, 201 bp, Homo sapiens; identical to SEQ ID NO: 8377

SEQ ID NO: 8456 - DNA, 201 bp, Homo sapiens; identical to SEQ ID NO: 8378

SEQ ID NO: 8457 - DNA, 201 bp, Homo sapiens; identical to SEQ ID NO: 8379

SEQ ID NO: 8458 - DNA, 201 bp, Homo sapiens; identical to SEQ ID NO: 8380

SEQ ID NO: 8459 - DNA, 201 bp, Homo sapiens; identical to SEQ ID NO: 8381

SEQ ID NO: 8460 - DNA, 201 bp, Homo sapiens; identical to SEQ ID NO: 8382

SEQ ID NO: 8461 - DNA, 201 bp, Homo sapiens; identical to SEQ ID NO: 8383

SEQ ID NO: 8462 - DNA, 114 bp, Homo sapiens; identical to SEQ ID NO: 8422

SEQ ID NO: 8463 - DNA, 201 bp, Homo sapiens; identical to SEQ ID NO: 8385

SEQ ID NO: 8464 - DNA, 201 bp, Homo sapiens; identical to SEQ ID NO: 8386

SEQ ID NO: 8465 - DNA, 201 bp, Homo sapiens; identical to SEQ ID NO: 8425

SEQ ID NO: 8466 - DNA, 201 bp, Homo sapiens; identical to SEQ ID NO: 8426

SEQ ID NO: 8467 - DNA, 138 bp, Homo sapiens; identical to SEQ ID NO: 8388

SEQ ID NO: 8468 - DNA, 201 bp, Homo sapiens; identical to SEQ ID NO: 8389

SEQ ID NO: 8469 - DNA, 201 bp, Homo sapiens; identical to SEQ ID NO: 8390

SEQ ID NO: 8470 - DNA, 201 bp, Homo sapiens; identical to SEQ ID NO: 8391

SEQ ID NO: 8471 - DNA, 201 bp, Homo sapiens; identical to SEQ ID NO: 8392

SEQ ID NO: 8472 - DNA, 201 bp, Homo sapiens; identical to SEQ ID NO: 8393

SEQ ID NO: 8473 - DNA, 201 bp, Homo sapiens; identical to SEQ ID NO: 8394

SEQ ID NO: 8474 - DNA, 201 bp, Homo sapiens; identical to SEQ ID NO: 8395

SEQ ID NO: 8475 - DNA, 201 bp, Homo sapiens; identical to SEQ ID NO: 8396

SEQ ID NO: 8476 - DNA, 201 bp, Homo sapiens; identical to SEQ ID NO: 8397

SEQ ID NO: 8477 - DNA, 201 bp, Homo sapiens; identical to SEQ ID NO: 8398

SEQ ID NO: 8478 - DNA, 201 bp, Homo sapiens; identical to SEQ ID NO: 8399

SEQ ID NO: 8479 - DNA, 201 bp, Homo sapiens; identical to SEQ ID NO: 8400

SEQ ID NO: 8480 - DNA, 201 bp, Homo sapiens; identical to SEQ ID NO: 8439

SEQ ID NO: 8481 - DNA, 201 bp, Homo sapiens; identical to SEQ ID NO: 8401

SEQ ID NO: 8482 - DNA, 201 bp, Homo sapiens; identical to SEQ ID NO: 8441

SEQ ID NO: 8483 - DNA, 201 bp, Homo sapiens; identical to SEQ ID NO: 8442

SEQ ID NO: 8484 - DNA, 201 bp, Homo sapiens; identical to SEQ ID NO: 8443

SEQ ID NO: 8485 - DNA, 201 bp, Homo sapiens; identical to SEQ ID NO: 8404

SEQ ID NO: 8486 - DNA, 201 bp, Homo sapiens; identical to SEQ ID NO: 8405

SEQ ID NO: 8487 - DNA, 201 bp, Homo sapiens; identical to SEQ ID NO: 8406

SEQ ID NO: 8488 - DNA, 201 bp, Homo sapiens; identical to SEQ ID NO: 8407

SEQ ID NO: 8489 - DNA, 201 bp, Homo sapiens; identical to SEQ ID NO: 8408

SEQ ID NO: 8490 - DNA, 201 bp, Homo sapiens; identical to SEQ ID NO: 8409

SEQ ID NO: 8491 - DNA, 201 bp, Homo sapiens; identical to SEQ ID NO: 8373

SEQ ID NO: 8492 - DNA, 201 bp, Homo sapiens; identical to SEQ ID NO: 8411

SEQ ID NO: 8493 - DNA, 201 bp, Homo sapiens; identical to SEQ ID NO: 8374

SEQ ID NO: 8494 - DNA, 201 bp, Homo sapiens; identical to SEQ ID NO: 8375

SEQ ID NO: 8495 - DNA, 201 bp, Homo sapiens; identical to SEQ ID NO: 8376

SEQ ID NO: 8496 - DNA, 201 bp, Homo sapiens; identical to SEQ ID NO: 8377

SEQ ID NO: 8497 - DNA, 201 bp, Homo sapiens; identical to SEQ ID NO: 8378

SEQ ID NO: 8498 - DNA, 201 bp, Homo sapiens; identical to SEQ ID NO: 8379

SEQ ID NO: 8499 - DNA, 201 bp, Homo sapiens; identical to SEQ ID NO: 8380

SEQ ID NO: 8500 - DNA, 201 bp, Homo sapiens; identical to SEQ ID NO: 8381

SEQ ID NO: 8501 - DNA, 201 bp, Homo sapiens; identical to SEQ ID NO: 8382

SEQ ID NO: 8502 - DNA, 201 bp, Homo sapiens; identical to SEQ ID NO: 8383

SEQ ID NO: 8503 - DNA, 114 bp, Homo sapiens; identical to SEQ ID NO: 8422

SEQ ID NO: 8504 - DNA, 201 bp, Homo sapiens; identical to SEQ ID NO: 8385

SEQ ID NO: 8505 - DNA, 201 bp, Homo sapiens; identical to SEQ ID NO: 8386

SEQ ID NO: 8506 - DNA, 201 bp, Homo sapiens; identical to SEQ ID NO: 8425

SEQ ID NO: 8507 - DNA, 201 bp, Homo sapiens; identical to SEQ ID NO: 8426

SEQ ID NO: 8508 - DNA, 138 bp, Homo sapiens; identical to SEQ ID NO: 8388

SEQ ID NO: 8509 - DNA, 201 bp, Homo sapiens; identical to SEQ ID NO: 8389

SEQ ID NO: 8510 - DNA, 201 bp, Homo sapiens
atggacccaacttccccagtgtgtggtggcacaaatacaattatgcccacctccacctcagattcccaattctcacaatatgacaaccacactgaattatygggatggagaaaaagtatctgttctttgccaagaaaattatctaattcaggaaggagaagaaattacatgcaaagatggaagatggcagtcaataccact

SEQ ID NO: 8511 - DNA, 201 bp, Homo sapiens; identical to SEQ ID NO: 8391

SEQ ID NO: 8512 - DNA, 201 bp, Homo sapiens; identical to SEQ ID NO: 8392

SEQ ID NO: 8513 - DNA, 201 bp, Homo sapiens
tttcttcccctccttattactatggagattcagtggaattcaattgctcagaatcatttacaatgattggacacagatcaattacgtgtattcatggagtmtggacccaacttccccagtgtgtggtggcacaaatacaattatgcccacctccacctcagattcccaattctcacaatatgacaaccacactgaattatc

SEQ ID NO: 8514 - DNA, 201 bp, Homo sapiens; identical to SEQ ID NO: 8394

SEQ ID NO: 8515 - DNA, 201 bp, Homo sapiens; identical to SEQ ID NO: 8395

SEQ ID NO: 8516 - DNA, 201 bp, Homo sapiens; identical to SEQ ID NO: 8396

SEQ ID NO: 8517 - DNA, 201 bp, Homo sapiens; identical to SEQ ID NO: 8397

SEQ ID NO: 8518 - DNA, 201 bp, Homo sapiens; identical to SEQ ID NO: 8398

SEQ ID NO: 8519 - DNA, 201 bp, Homo sapiens; identical to SEQ ID NO: 8399

SEQ ID NO: 8520 - DNA, 201 bp, Homo sapiens; identical to SEQ ID NO: 8400

SEQ ID NO: 8521 - DNA, 201 bp, Homo sapiens; identical to SEQ ID NO: 8439

SEQ ID NO: 8522 - DNA, 201 bp, Homo sapiens; identical to SEQ ID NO: 8401

SEQ ID NO: 8523 - DNA, 201 bp, Homo sapiens; identical to SEQ ID NO: 8441

SEQ ID NO: 8524 - DNA, 201 bp, Homo sapiens; identical to SEQ ID NO: 8442

SEQ ID NO: 8525 - DNA, 201 bp, Homo sapiens; identical to SEQ ID NO: 8443

SEQ ID NO: 8526 - DNA, 201 bp, Homo sapiens; identical to SEQ ID NO: 8404

SEQ ID NO: 8527 - DNA, 201 bp, Homo sapiens; identical to SEQ ID NO: 8405

SEQ ID NO: 8528 - DNA, 201 bp, Homo sapiens; identical to SEQ ID NO: 8406

SEQ ID NO: 8529 - DNA, 201 bp, Homo sapiens; identical to SEQ ID NO: 8407

SEQ ID NO: 8530 - DNA, 201 bp, Homo sapiens; identical to SEQ ID NO: 8409

SEQ ID NO: 8531 - DNA, 201 bp, Homo sapiens; identical to SEQ ID NO: 8373

SEQ ID NO: 8532 - DNA, 201 bp, Homo sapiens; identical to SEQ ID NO: 8374

SEQ ID NO: 8533 - DNA, 201 bp, Homo sapiens; identical to SEQ ID NO: 8375

SEQ ID NO: 8534 - DNA, 201 bp, Homo sapiens; identical to SEQ ID NO: 8376

SEQ ID NO: 8535 - DNA, 201 bp, Homo sapiens; identical to SEQ ID NO: 8377

SEQ ID NO: 8536 - DNA, 201 bp, Homo sapiens; identical to SEQ ID NO: 8378

SEQ ID NO: 8537 - DNA, 201 bp, Homo sapiens; identical to SEQ ID NO: 8379

SEQ ID NO: 8538 - DNA, 201 bp, Homo sapiens; identical to SEQ ID NO: 8380

SEQ ID NO: 8539 - DNA, 201 bp, Homo sapiens; identical to SEQ ID NO: 8381

SEQ ID NO: 8540 - DNA, 201 bp, Homo sapiens; identical to SEQ ID NO: 8382

SEQ ID NO: 8541 - DNA, 201 bp, Homo sapiens; identical to SEQ ID NO: 8383

SEQ ID NO: 8542 - DNA, 111 bp, Homo sapiens; identical to SEQ ID NO: 8384

SEQ ID NO: 8543 - DNA, 201 bp, Homo sapiens; identical to SEQ ID NO: 8385

SEQ ID NO: 8544 - DNA, 201 bp, Homo sapiens; identical to SEQ ID NO: 8386

SEQ ID NO: 8545 - DNA, 201 bp, Homo sapiens; identical to SEQ ID NO: 8387

SEQ ID NO: 8546 - DNA, 138 bp, Homo sapiens; identical to SEQ ID NO: 8388

SEQ ID NO: 8547 - DNA, 201 bp, Homo sapiens; identical to SEQ ID NO: 8389

SEQ ID NO: 8548 - DNA, 201 bp, Homo sapiens; identical to SEQ ID NO: 8510

SEQ ID NO: 8549 - DNA, 201 bp, Homo sapiens; identical to SEQ ID NO: 8391

SEQ ID NO: 8550 - DNA, 201 bp, Homo sapiens; identical to SEQ ID NO: 8392

SEQ ID NO: 8551 - DNA, 201 bp, Homo sapiens; identical to SEQ ID NO: 8513

SEQ ID NO: 8552 - DNA, 201 bp, Homo sapiens; identical to SEQ ID NO: 8394

SEQ ID NO: 8553 - DNA, 201 bp, Homo sapiens; identical to SEQ ID NO: 8395

SEQ ID NO: 8554 - DNA, 201 bp, Homo sapiens; identical to SEQ ID NO: 8396

SEQ ID NO: 8555 - DNA, 201 bp, Homo sapiens; identical to SEQ ID NO: 8397

SEQ ID NO: 8556 - DNA, 201 bp, Homo sapiens; identical to SEQ ID NO: 8398

SEQ ID NO: 8557 - DNA, 201 bp, Homo sapiens; identical to SEQ ID NO: 8399

SEQ ID NO: 8558 - DNA, 201 bp, Homo sapiens; identical to SEQ ID NO: 8400

SEQ ID NO: 8559 - DNA, 201 bp, Homo sapiens; identical to SEQ ID NO: 8401

SEQ ID NO: 8560 - DNA, 201 bp, Homo sapiens; identical to SEQ ID NO: 8402

SEQ ID NO: 8561 - DNA, 201 bp, Homo sapiens; identical to SEQ ID NO: 8403

SEQ ID NO: 8562 - DNA, 201 bp, Homo sapiens; identical to SEQ ID NO: 8404

SEQ ID NO: 8563 - DNA, 201 bp, Homo sapiens; identical to SEQ ID NO: 8405

SEQ ID NO: 8564 - DNA, 201 bp, Homo sapiens; identical to SEQ ID NO: 8406

SEQ ID NO: 8565 - DNA, 201 bp, Homo sapiens; identical to SEQ ID NO: 8407

SEQ ID NO: 8566 - DNA, 201 bp, Homo sapiens; identical to SEQ ID NO: 8409

SEQ ID NO: 8567 - DNA, 201 bp, Homo sapiens
ggagtggagcaccagcaactgttagacctcgcccagaagcacctcggtggcatcccatggacatatgcagaggacgctgtgcccactcttactccatgccrcttcactggcagtgagatccgccaccgtgatgatgctctaccttttgcccacgtggccattgcagtagagggtcctggctgggccagcccggacaatgtg

SEQ ID NO: 8568 - DNA, 201 bp, Homo sapiens
agtacatctatgaccagtgcccagcagtggctggatatggccccattgagcagctcccagactacaaccggatccgtagcggcatgttctggctgcgcttytaggcgggaagcctatgtaagcaagagggcagggccggggtttgtggtcccccccccaccacaaacacagcacttcggctcctctaacctgtgccacagg

SEQ ID NO: 8569 - DNA, 176 bp, Homo sapiens
cccagactacaaccggatccgtagcggcatgttctggctgcgcttctaggcgggaagcctatgtaagcaagagggcagggccggggtttgtggtccccccyccaccacaaacacagcacttcggctcctctaacctgtgccacaggtgaccaccaataaaatcctctgctgagaag

SEQ ID NO: 8570 - DNA, 174 bp, Homo sapiens
cagactacaaccggatccgtagcggcatgttctggctgcgcttctaggcgggaagcctatgtaagcaagagggcagggccggggtttgtggtccccccccmaccacaaacacagcacttcggctcctctaacctgtgccacaggtgaccaccaataaaatcctctgctgagaag

SEQ ID NO: 8571 - DNA, 201 bp, Homo sapiens
accagtgcccagcagtggctggatatggccccattgagcagctcccagactacaaccggatccgtagcggcatgttctggctgcgcttctaggcgggaagyctatgtaagcaagagggcagggccggggtttgtggtcccccccccaccacaaacacagcacttcggctcctctaacctgtgccacaggtgaccaccaata

SEQ ID NO: 8572 - DNA, 201 bp, Homo sapiens
actttggcatttctgtagctgagcacagcaggggaggggttaatgcagatggcaagtgcaccaaggagaaggcaggaatgctggagcctggaataagggargagaggggactggagagtgtggggaataggaagaagaaatttcctttagactaacgaatatattggggggaggaatagaggggaggtgtgcaggaaccag

SEQ ID NO: 8573 - DNA, 201 bp, Homo sapiens
aagccacacaaaccattgggagtgaaatccgtgccatcaggcaagccagagccagggcccgactccctgtgaccacctggcgaatctcagctggaagtggwggtcaagcagagagaacgattgcaggcaccacccgggcagtgagcagaggagcccggatcctgagtgcgaccacttcaggcatcttccttgcactggatg

SEQ ID NO: 8574 - DNA, 201 bp, Homo sapiens
cgtctgctgtgactgggatcaccaccagcatcgtggagcactcatacacatcatcagcagaagctgaagccagcaggctgactgcaaccagcattgaccgmttgaaggtatttaaggaagttatgcgtgacatcacacccaacttactttcccttcttaataattattacgaagccacacaaaccattgggagtgaaatcc

SEQ ID NO: 8575 - DNA, 201 bp, Homo sapiens
agaaacgctttactgaagaggccaccaaatacttccgggagagagtcagcccagtgcatctgcaaatcctgctgactaacaatgaagcctggaagagattygtgactgcggctgaattgcccagggatgaggcagatgctctctacgaagctctgaagaagcttagaacatatgcagctattgaggacgaatatgtgcagc

SEQ ID NO: 8576 - DNA, 201 bp, Homo sapiens
ttacagcagggacgagtctggcccttactgcagctggggtagggctgggagcagcgtctgctgtgactgggatcaccaccagcatcgtggagcactcatayacatcatcagcagaagctgaagccagcaggctgactgcaaccagcattgaccgattgaaggtatttaaggaagttatgcgtgacatcacacccaacttac

SEQ ID NO: 8577 - DNA, 201 bp, Homo sapiens
tggcatcatgtcccttgctggtcttgttttggcaccatttacagcagggacgagtctggcccttactgcagctggggtagggctgggagcagcgtctgctrtgactgggatcaccaccagcatcgtggagcactcatacacatcatcagcagaagctgaagccagcaggctgactgcaaccagcattgaccgattgaaggt

SEQ ID NO: 8578 - DNA, 201 bp, Homo sapiens
aaataccagctggctggggcccaggagattaaaaaacaccgggctagggttaagaaaaaaaacgaacccttccagtcaggtcagtgactggagagctccawggaaagtctctcagtgacctggctgctggcaccatggactcagaaaagaaacgctttactgaagaggccaccaaatacttccgggagagagtcagcccag

SEQ ID NO: 8579 - DNA, 201 bp, Homo sapiens
ggtggggctgggaagcatcctgttttgcatgtttgatcaggagctgctgccaagttgtgactttcactttcccttttgggttccagggtatatctcagagmctggagaacgtgtctggttattatgcagatgcacggctggaggtgggatccacacagctcagaacagctggatcttgctcacactctttcaagagaagct

SEQ ID NO: 8580 - DNA, 201 bp, Homo sapiens
tgtgactttcactttcccttttgggttccagggtatatctcagagactggagaacgtgtctggttattatgcagatgcacggctggaggtgggatccacayagctcagaacagctggatcttgctcacactctttcaagagaagcttccttggacaaaaggaccctgccttggtgtgagagtgagggcagagggagctgga

SEQ ID NO: 8581 - DNA, 201 bp, Homo sapiens
agtttccccaagtcaagaggaagatccaggagtccatagaaaagcttcgtgcccttgcaaatggtattgaagaggtccacagaggctgcaccatctccaaygtggtgtccagctccactggcgctgcctctggcatcatgtcccttgctggtcttgttttggcaccatttacagcagggacgagtctggcccttactgcag

SEQ ID NO: 8582 - DNA, 201 bp, Homo sapiens; identical to SEQ ID NO: 8572

SEQ ID NO: 8583 - DNA, 201 bp, Homo sapiens; identical to SEQ ID NO: 8573

SEQ ID NO: 8584 - DNA, 201 bp, Homo sapiens; identical to SEQ ID NO: 8574

SEQ ID NO: 8585 - DNA, 201 bp, Homo sapiens; identical to SEQ ID NO: 8575

SEQ ID NO: 8586 - DNA, 201 bp, Homo sapiens; identical to SEQ ID NO: 8576

SEQ ID NO: 8587 - DNA, 201 bp, Homo sapiens; identical to SEQ ID NO: 8577

SEQ ID NO: 8588 - DNA, 201 bp, Homo sapiens
cagaacagctggatcttgctcacactctttcaagagaagcttccttgggttaagaaaaaaaacgaacccttccagtcaggtcagtgactggagagctccawggaaagtctctcagtgacctggctgctggcaccatggactcagaaaagaaacgctttactgaagaggccaccaaatacttccgggagagagtcagcccag

SEQ ID NO: 8589 - DNA, 201 bp, Homo sapiens; identical to SEQ ID NO: 8579

SEQ ID NO: 8590 - DNA, 201 bp, Homo sapiens
tgtgactttcactttcccttttgggttccagggtatatctcagagactggagaacgtgtctggttattatgcagatgcacggctggaggtgggatccacayagctcagaacagctggatcttgctcacactctttcaagagaagcttccttgggttaagaaaaaaaacgaacccttccagtcaggtcagtgactggagagc

SEQ ID NO: 8591 - DNA, 201 bp, Homo sapiens; identical to SEQ ID NO: 8581

SEQ ID NO: 8592 - DNA, 201 bp, Homo sapiens; identical to SEQ ID NO: 8572

SEQ ID NO: 8593 - DNA, 201 bp, Homo sapiens; identical to SEQ ID NO: 8573

SEQ ID NO: 8594 - DNA, 201 bp, Homo sapiens; identical to SEQ ID NO: 8574

SEQ ID NO: 8595 - DNA, 201 bp, Homo sapiens; identical to SEQ ID NO: 8575

SEQ ID NO: 8596 - DNA, 201 bp, Homo sapiens; identical to SEQ ID NO: 8576

SEQ ID NO: 8597 - DNA, 201 bp, Homo sapiens; identical to SEQ ID NO: 8579

SEQ ID NO: 8598 - DNA, 201 bp, Homo sapiens; identical to SEQ ID NO: 8577

SEQ ID NO: 8599 - DNA, 201 bp, Homo sapiens
tgtgactttcactttcccttttgggttccagggtatatctcagagactggagaacgtgtctggttattatgcagatgcacggctggaggtgggatccacayagctcagaacagctggatcttgctcacactctttcaagagaagcttccttgaaaagaaacgctttactgaagaggccaccaaatacttccgggagagagt

SEQ ID NO: 8600 - DNA, 201 bp, Homo sapiens; identical to SEQ ID NO: 8581

SEQ ID NO: 8601 - DNA, 201 bp, Homo sapiens; identical to SEQ ID NO: 8572

SEQ ID NO: 8602 - DNA, 201 bp, Homo sapiens; identical to SEQ ID NO: 8573

SEQ ID NO: 8603 - DNA, 201 bp, Homo sapiens; identical to SEQ ID NO: 8574

SEQ ID NO: 8604 - DNA, 201 bp, Homo sapiens; identical to SEQ ID NO: 8575

SEQ ID NO: 8605 - DNA, 201 bp, Homo sapiens; identical to SEQ ID NO: 8576

SEQ ID NO: 8606 - DNA, 201 bp, Homo sapiens; identical to SEQ ID NO: 8577

SEQ ID NO: 8607 - DNA, 201 bp, Homo sapiens
acaggtggctcacattcagtcccacaatttgctttctcctcctcaagggttaagaaaaaaaacgaacccttccagtcaggtcagtgactggagagctccawggaaagtctctcagtgacctggctgctggcaccatggactcagaaaagaaacgctttactgaagaggccaccaaatacttccgggagagagtcagcccag

SEQ ID NO: 8608 - DNA, 201 bp, Homo sapiens; identical to SEQ ID NO: 8579

SEQ ID NO: 8609 - DNA, 201 bp, Homo sapiens; identical to SEQ ID NO: 8580

SEQ ID NO: 8610 - DNA, 201 bp, Homo sapiens; identical to SEQ ID NO: 8581

SEQ ID NO: 8611 - DNA, 201 bp, Homo sapiens
gcgctgcgcgctggggaccgcctggtcgaggtcaacggcgtcaacgtggagggcgagacgcaccaccaggtggtgcaaaggatcaaggctgtggaggggcwgactcggctgctggtggtggaccaggagacagatgaggagctccgccggcggcagctgacctgtaccgaggagatggcccagcgagggctcccacccgcc

SEQ ID NO: 8612 - DNA, 201 bp, Homo sapiens
gctggcaagaaggatgtcagtgggcccctgagggagctgcgccctcggctctgccacctgcgaaagggacctcagggctatgggttcaacctgcatagtgwcaagtcccggcccggccagtacatccgctctgtggacccgggctcacctgccgcccgctctggcctccgcgcccaggaccggctcattgaggtgaacggg

SEQ ID NO: 8613 - DNA, 201 bp, Homo sapiens
gagacagagacagagagagagagagagagacacagagagagacagagagagagcgagcgagcgcgcggcagccgcggggcgagggcctttgctgctctgcyggggcctgctgactgaaaggaatttgtgtttttgctttttttccaaaaagatctccagctccacacatgtttccacttaataccagagacccccccccct

SEQ ID NO: 8614 - DNA, 201 bp, Homo sapiens
gcgccctcggctctgccacctgcgaaagggacctcagggctatgggttcaacctgcatagtgacaagtcccggcccggccagtacatccgctctgtggacscgggctcacctgccgcccgctctggcctccgcgcccaggaccggctcattgaggtgaacgggcagaatgtggagggactgcgccatgctgaggtggtggc

SEQ ID NO: 8615 - DNA, 201 bp, Homo sapiens; identical to SEQ ID NO: 8611

SEQ ID NO: 8616 - DNA, 201 bp, Homo sapiens; identical to SEQ ID NO: 8612

SEQ ID NO: 8617 - DNA, 201 bp, Homo sapiens
gggggcctgtggcagcaagatagggggagagagacccagagatgtgagagagagtcagagacagagacagaccgcggggcgagggcctttgctgctctgcyggggcctgctgactgaaaggaatttgtgtttttgctttttttccaaaaagatctccagctccacacatgtttccacttaataccagagacccccccccct

SEQ ID NO: 8618 - DNA, 201 bp, Homo sapiens; identical to SEQ ID NO: 8614

SEQ ID NO: 8619 - DNA, 201 bp, Homo sapiens; identical to SEQ ID NO: 8611

SEQ ID NO: 8620 - DNA, 201 bp, Homo sapiens; identical to SEQ ID NO: 8612

SEQ ID NO: 8621 - DNA, 201 bp, Homo sapiens; identical to SEQ ID NO: 8617

SEQ ID NO: 8622 - DNA, 201 bp, Homo sapiens; identical to SEQ ID NO: 8614

SEQ ID NO: 8623 - DNA, 201 bp, Homo sapiens
tgctggttctgctgcctggggcccaggggctccctggtgttggcctcacaccttcagctgcccagactgcccgtcagcaccccaagatgcatcttgcccamagcaccctcaaacctgctgctcacctcattggagaccccagcaagcagaactcactgctctggagagcaaacacggaccgtgccttcctccaggatggtt

SEQ ID NO: 8624 - DNA, 176 bp, Homo sapiens
tcccagcccacgattcccctgacccgactccctttcccagaactcagtcgcctgaacccccagcctgtggttctcmcctaggcctcagcctttcctgcctttgactgaaacagcagtatcttctaagccctgggggcttccccgggccccagccccgacctagaacccgcccgctg

SEQ ID NO: 8625 - DNA, 201 bp, Homo sapiens
gcacagcaggttctccccatgacaccacctgaacgtctcttcctcccaagggtgtgtggcaccaccctacacctcctccttctggggctgctgctggttcsgctgcctggggcccaggggctccctggtgttggcctcacaccttcagctgcccagactgcccgtcagcaccccaagatgcatcttgcccacagcaccctc

SEQ ID NO: 8626 - DNA, 106 bp, Homo sapiens
tcccarcccacgattcccctgacccgactccctttcccagaactcagtcgcctgaacccccagcctgtggttctctcctaggcctcagcctttcctgcctttgact

SEQ ID NO: 8627 - DNA, 201 bp, Homo sapiens
ccctacacctcctccttctggggctgctgctggttctgctgcctggggcccaggggctccctggtgttggcctcacaccttcagctgcccagactgcccgmcagcaccccaagatgcatcttgcccacagcaccctcaaacctgctgctcacctcattggagaccccagcaagcagaactcactgctctggagagcaaaca

SEQ ID NO: 8628 - DNA, 201 bp, Homo sapiens
actgaaacagcagtatcttctaagccctgggggcttccccgggccccagccccgacctagaacccgcccgctgcctgccacgctgccactgccgcttcctytataaagggacctgagcgtccgggcccaggggctccgcacagcaggttctccccatgacaccacctgaacgtctcttcctcccaagggtgtgtggcacca

SEQ ID NO: 8629 - DNA, 201 bp, Homo sapiens
acacctcctccttctggggctgctgctggttctgctgcctggggcccaggggctccctggtgttggcctcacaccttcagctgcccagactgcccgtcagyaccccaagatgcatcttgcccacagcaccctcaaacctgctgctcacctcattggagaccccagcaagcagaactcactgctctggagagcaaacacgga

SEQ ID NO: 8630 - DNA, 201 bp, Homo sapiens
gttctgctgcctggggcccaggggctccctggtgttggcctcacaccttcagctgcccagactgcccgtcagcaccccaagatgcatcttgcccacagcamcctcaaacctgctgctcacctcattggagaccccagcaagcagaactcactgctctggagagcaaacacggaccgtgccttcctccaggatggtttctcc

SEQ ID NO: 8631 - DNA, 176 bp, Homo sapiens
gctccgcacagcaggtgaggctctcctgccccatctccttgggctgcccgtgcttcgtgctttggactaccgcccmgcagtgtcctgccctctgcctgggcctcggtccctcctgcacctgctgcctggatccccggcctgcctgggcctgggccttggttctccccatgacacca

SEQ ID NO: 8632 - DNA, 201 bp, Homo sapiens
cacctcctccttctggggctgctgctggttctgctgcctggggcccaggggctccctggtgttggcctcacaccttcagctgcccagactgcccgtcagcmccccaagatgcatcttgcccacagcaccctcaaacctgctgctcacctcattggagaccccagcaagcagaactcactgctctggagagcaaacacggac

SEQ ID NO: 8633 - DNA, 106 bp, Homo sapiens
gctccrcacagcaggtgaggctctcctgccccatctccttgggctgcccgtgcttcgtgctttggactaccgcccagcagtgtcctgccctctgcctgggcctcgg

SEQ ID NO: 8634 - DNA, 201 bp, Homo sapiens
cggtccctcctgcacctgctgcctggatccccggcctgcctgggcctgggccttggttctccccatgacaccacctgaacgtctcttcctcccaagggtgygtggcaccaccctacacctcctccttctggggctgctgctggttctgctgcctggggcccaggggctccctggtgttggcctcacaccttcagctgccca

SEQ ID NO: 8635 - DNA, 201 bp, Homo sapiens
tcctccttctggggctgctgctggttctgctgcctggggcccaggggctccctggtgttggcctcacaccttcagctgcccagactgcccgtcagcacccyaagatgcatcttgcccacagcaccctcaaacctgctgctcacctcattggagaccccagcaagcagaactcactgctctggagagcaaacacggaccgtg

SEQ ID NO: 8636 - DNA, 201 bp, Homo sapiens
gggtgatcagtaccagacggtgaaggccctagctgagcgcaaggcccaaggtgtgctggctgcacaggcaagggcagaacaactgcgggatgaggctcggracctgttgcaagccgctcaggacaagctgcagcggctacaggaattggaaggcacctatgaggaaaatgagcgggcactggagagtaaggcagcccagtt

SEQ ID NO: 8637 - DNA, 201 bp, Homo sapiens
gtgccactgccgggcaggctatacggggctgcgatgtgaagcttgtgcccctgggcactttggggacccatcaaggccaggtggccggtgccaactgtgtragtgcagtgggaacattgacccaatggatcctgatgcctgtgacccccacacggggcaatgcctgcgctgtttacaccacacagagggtccacactgtgc

SEQ ID NO: 8638 - DNA, 201 bp, Homo sapiens
gattgcagagcgagtccggagcctggcagatgtggatgcgatcctggcacgtactgtaggagatgtgcgtcgtgccgagcagctactgcaggatgcacggygggcaaggagctgggctgaggatgagaaacagaaggcagagacagtacaggcagcactggaggaggcccagcgggcacagggtattgcccagggtgccat

SEQ ID NO: 8639 - DNA, 201 bp, Homo sapiens
cccctgggcactttggggacccatcaaggccaggtggccggtgccaactgtgtgagtgcagtgggaacattgacccaatggatcctgatgcctgtgacccmcacacggggcaatgcctgcgctgtttacaccacacagagggtccacactgtgcccactgcaagcctggcttccatgggcaggctgcccgacagagctgtc

SEQ ID NO: 8640 - DNA, 201 bp, Homo sapiens
gggaaagagggaggggacagcctctgccctgggaacttcgactgggcctactgctaagcgtgctggctgccacactggcacaggcccctgccccggatgtscctggctgttccaggggaagctgctaccccgccacgggcgacctgctggtgggccgagctgacagactgactgcctcatccacttgtggcctgaatggcc

SEQ ID NO: 8641 - DNA, 201 bp, Homo sapiens
ggcccccagccctactgcatcgtcagtcacctgcaggacgaaaagaagtgcttcctttgtgactcccggcgccccttctctgctagagacaacccacacasccatcgcatccagaatgtagtcaccagctttgcaccacagcggcgggcagcctggtggcagtcagagaatggtatccctgcggtcaccatccagctggac

SEQ ID NO: 8642 - DNA, 201 bp, Homo sapiens
cctgccacccaagccgggccagaggccccacctgcaacgagttcacagggcagtgccactgccgtgccggctttggagggcggacttgttctgagtgccargagctccactggggagaccctgggttgcagtgccatgcctgtgattgtgactctcgtggaatagatacacctcagtgtcaccgcttcacaggtcactgca

SEQ ID NO: 8643 - DNA, 201 bp, Homo sapiens
cctccactgcacagcttgtggaggccacagaggagctgcggcgtgaaattggggaggccactgagcacctgactcagctcgaggcagacctgacagatgtkcaagatgagaacttcaatgccaaccatgcactaagtggtctggagcgagataggcttgcacttaatctcacactgcggcagctcgaccagcatcttgact

SEQ ID NO: 8644 - DNA, 201 bp, Homo sapiens
cctcattatgaccttcaagacatttcgccctgctgccatgctggtggaacgctcagcagactttggccgcacctggcatgtgtaccgatatttctcctatsactgtggggctgacttcccaggagtcccactagcacccccacggcactgggatgatgtagtctgtgagtcccgctactcagagattgagccatccactga

SEQ ID NO: 8645 - DNA, 201 bp, Homo sapiens
ccatgtcagtgcaaccctcaaggttcactgagttctgagtgcaaccctcatggtggtcagtgcctgtgcaagcctggagtggttgggcgccgctgtgacckctgtgcccctggctactatggctttggccccacaggctgtcaagcctgccagtgcagccacgagggggcactcagcagtctctgtgaaaagaccagtggg

SEQ ID NO: 8646 - DNA, 142 bp, Homo sapiens
agggaccgctggacagacctgggaactgacagagggcctggwgggaaacaggccaaagacccacaggatggagctgacctcaagggaaagagggaggggacagcctctgccctgggaacttcgactgggcctactgctaagc

SEQ ID NO: 8647 - DNA, 201 bp, Homo sapiens
gtgattgtgaccccatgggttctcaagacggtggtcgctgtgattcccatgatgaccctgcactgggactggtctccggccagtgtcgctgcaaagaacaygtggtgggcactcgctgccagcaatgccgtgatggcttctttgggctcagcatcagtgaccgtctgggctgccggcgatgtcaatgtaatgcacggggca

SEQ ID NO: 8648 - DNA, 201 bp, Homo sapiens
tttgggaggctgaggacacccgagggcaggtgctcgatgtggtggagcgcctggtgacccccggggaaactccatcctggactggctcaggcttcgtgcgrctacaggaaggtcagaccctggagttcctggtggcctctgtgccgaaggctatggactatgacctgctgctgcgcttagagccccaggtccctgagcaat

SEQ ID NO: 8649 - DNA, 201 bp, Homo sapiens
ttagagccccaggtccctgagcaatgggcagagttggaactgattgtgcagcgtccagggcctgtgcctgcccacagcctgtgtgggcatttggtgcccarggatgatcgcatccaagggactctgcaaccacatgccaggtacttgatatttcctaatcctgtctgccttgagcctggtatctcctacaagctgcatctg

SEQ ID NO: 8650 - DNA, 201 bp, Homo sapiens
gcctggtgacccccggggaaactccatcctggactggctcaggcttcgtgcggctacaggaaggtcagaccctggagttcctggtggcctctgtgccgaasgctatggactatgacctgctgctgcgcttagagccccaggtccctgagcaatgggcagagttggaactgattgtgcagcgtccagggcctgtgcctgccc

SEQ ID NO: 8651 - DNA, 201 bp, Homo sapiens
accaggagggggctgatcctgatagcattgaaatggtggccacacgggtgctagagctctccatcccagcttcagctgagcagatccagcacctggcgggygcgattgcagagcgagtccggagcctggcagatgtggatgcgatcctggcacgtactgtaggagatgtgcgtcgtgccgagcagctactgcaggatgcac

SEQ ID NO: 8652 - DNA, 201 bp, Homo sapiens
cacacagccatcgcatccagaatgtagtcaccagctttgcaccacagcggcgggcagcctggtggcagtcagagaatggtatccctgcggtcaccatccasctggacctggaggctgagtttcatttcacacacctcattatgaccttcaagacatttcgccctgctgccatgctggtggaacgctcagcagactttggcc

SEQ ID NO: 8653 - DNA, 201 bp, Homo sapiens
gaatctttcctgcctgccatccctgccatgcatgcttcggggattgggaccgagtggtgcaggacttggcagcccgtacacagcgcctagagcagcgggcrcaggagttgcaacagacgggtgtgctgggtgcctttgagagcagcttctggcacatgcaggagaagctgggcattgtgcagggcatcgtaggtgcccgca

SEQ ID NO: 8654 - DNA, 125 bp, Homo sapiens
agggaccgctggacagacctgggawctgacagagggcctggagggaaacaggccaaagacccacaggatggagctgacctcaagggaaagagggaggggacagcctctgccctgggaacttcgac

SEQ ID NO: 8655 - DNA, 201 bp, Homo sapiens
caacagtggatcctgttactgcaaacgtctagtgactggacgtggatgtgaccgctgcctgcctggccactggggcctgagccacgacctgctcggctgcygcccctgtgactgcgacgtgggtggtgctttggatccccagtgtgatgagggcacaggtcaatgccactgccgccagcacatggttgggcgacgctgtga

SEQ ID NO: 8656 - DNA, 201 bp, Homo sapiens
cactgccgccagcacatggttgggcgacgctgtgagcaggtgcaacctggctacttccggcccttcctggaccacctaatttgggaggctgaggacacccragggcaggtgctcgatgtggtggagcgcctggtgacccccggggaaactccatcctggactggctcaggcttcgtgcggctacaggaaggtcagaccctg

SEQ ID NO: 8657 - DNA, 201 bp, Homo sapiens
tgggcatgcagatgagtgcaacacccacacaggcgcttgcctgggctgccgtgatcacacagggggtgagcactgtgaaaggtgcattgctggtttccacrgggacccacggctgccatatgggggccagtgccggccctgtccctgtcctgaaggccctgggagccaacggcactttgctacttcttgccaccaggatga

SEQ ID NO: 8658 - DNA, 201 bp, Homo sapiens
tgcaacctggctacttccggcccttcctggaccacctaatttgggaggctgaggacacccgagggcaggtgctcgatgtggtggagcgcctggtgaccccyggggaaactccatcctggactggctcaggcttcgtgcggctacaggaaggtcagaccctggagttcctggtggcctctgtgccgaaggctatggactatg

SEQ ID NO: 8659 - DNA, 201 bp, Homo sapiens; identical to SEQ ID NO: 8636

SEQ ID NO: 8660 - DNA, 201 bp, Homo sapiens; identical to SEQ ID NO: 8637

SEQ ID NO: 8661 - DNA, 201 bp, Homo sapiens; identical to SEQ ID NO: 8638

SEQ ID NO: 8662 - DNA, 201 bp, Homo sapiens; identical to SEQ ID NO: 8639

SEQ ID NO: 8663 - DNA, 201 bp, Homo sapiens; identical to SEQ ID NO: 8640

SEQ ID NO: 8664 - DNA, 201 bp, Homo sapiens; identical to SEQ ID NO: 8641

SEQ ID NO: 8665 - DNA, 201 bp, Homo sapiens; identical to SEQ ID NO: 8642

SEQ ID NO: 8666 - DNA, 201 bp, Homo sapiens; identical to SEQ ID NO: 8643

SEQ ID NO: 8667 - DNA, 201 bp, Homo sapiens; identical to SEQ ID NO: 8644

SEQ ID NO: 8668 - DNA, 201 bp, Homo sapiens; identical to SEQ ID NO: 8645

SEQ ID NO: 8669 - DNA, 201 bp, Homo sapiens
ctttccttcctgccgcgattcccaactttgctcaaagtcgctggactctaagctgtcggagggaccgctggacagacctgggaactgacagagggcctggwgggaaacaggccaaagacccacaggcagagttgacacggaaccccaaagcaaggaggagggctcgggcccgagaccgttcacctccccttatccctgttc

SEQ ID NO: 8670 - DNA, 201 bp, Homo sapiens; identical to SEQ ID NO: 8647

SEQ ID NO: 8671 - DNA, 201 bp, Homo sapiens; identical to SEQ ID NO: 8648

SEQ ID NO: 8672 - DNA, 201 bp, Homo sapiens; identical to SEQ ID NO: 8649

SEQ ID NO: 8673 - DNA, 201 bp, Homo sapiens; identical to SEQ ID NO: 8650

SEQ ID NO: 8674 - DNA, 201 bp, Homo sapiens; identical to SEQ ID NO: 8651

SEQ ID NO: 8675 - DNA, 201 bp, Homo sapiens; identical to SEQ ID NO: 8652

SEQ ID NO: 8676 - DNA, 201 bp, Homo sapiens; identical to SEQ ID NO: 8653

SEQ ID NO: 8677 - DNA, 201 bp, Homo sapiens
ccagaatccgctccggcctttccttcctgccgcgattcccaactttgctcaaagtcgctggactctaagctgtcggagggaccgctggacagacctgggawctgacagagggcctggagggaaacaggccaaagacccacaggcagagttgacacggaaccccaaagcaaggaggagggctcgggcccgagaccgttcacc

SEQ ID NO: 8678 - DNA, 201 bp, Homo sapiens; identical to SEQ ID NO: 8655

SEQ ID NO: 8679 - DNA, 201 bp, Homo sapiens; identical to SEQ ID NO: 8656

SEQ ID NO: 8680 - DNA, 201 bp, Homo sapiens; identical to SEQ ID NO: 8657

SEQ ID NO: 8681 - DNA, 201 bp, Homo sapiens; identical to SEQ ID NO: 8658

SEQ ID NO: 8682 - DNA, 77763 bp, Homo sapiens
tatgtttatcaggtccatttggtctatagtgtcgatcaagccccttgttaactaattgatcttttgtctagatgttctaacctttattggaactagggtattaaaatcctctattattatcatgttgctgtctatttctcccttcagttctgccaatgtttgcttcatatacttaggtgttctgatgttggtgcatataaatttatcattgttatatctttctggtgaattgaaccttttatcattatatgatgtctttctttgtttcttttgacaatttttgatttaaagtctgttatggtctgaatgtccccaaaaattcatgggttgaaacttaatccccattgtggtggttttaagaggtggagcctcttgggacgtgattaaataatgaaatatctgccttcatggatggattatagcctcatcaaatgcctagacagaactagcttaggcccttttttctcttctactcttccaccatgtgaggacacagcaattcatctctttttgtccttcttccaccatgtgaggttacagcaagaaagccttcacaagacttgaatgccagaacctttgacttcccaatctccatagctgtaagaaatcaatttctgttatttataaattacccagtttcagatattttactacagttgcacaaacagacgaagataaagtctattttatcttttgtaggtatggctactcctgccctcttttggttatcattcgcatggaatatttttccatccttatactttcagcctatgtgtgttcttaaatctaaagtgaatcttgtagacagtgcatagttggatcttatttttttaaaactcattcaactgtgctatgtcatttgggcagcttagtccatttatatttaaagtaattattgatagaaaaggggttactatcaacattttgaaatttgttttttgtgttgtagctattctgttgctctttttatctcttgctatcttcctttgtgtttcatggattttttatggtgacatgattttatacctttcttactttcttttgtggaaattccataggtattttctttgtgctcactgtgggacttacataaaacagcttatagatataactatctttttaaagccgataaaacttaaattcagcttcatataaaaactttgcttttacttccccccccccacagttatggatgtcacaaattatatttttaataatgtacagccattaatatatttttataattataattacttctatgcttttgtttttttttaacttttataccagaattaagtgattcacacaatactgttacactattacagtattctgtacctgtctatatatctatctttaccagttagctttatactttcatgtttttgtattgctgtttagtatctttccatttcaacttcaaggactctctttagcatttcttgaaaggcaactctagtgatgatcttattctgcttttgtttgtttaggaaagtctttatttctcatttttgaaggctagttttgccagagagagtattcttggttggctggttcttttctttcagcacttttaatacctcatcccattcccttttgtccttcaaagtttctgctaagaaatccattgctaatcttataggagtgtccttgtatgtaatgaactgcttttctcttgttgctttcaaaattctctttttggctttcgacaatttgattataatgtgcttcagtgtctatttgtttgggttcatcttatttaggcctattgggcttcttggatctgtagtccattttctccctcagatttgagaagttttcagccattatttctttaaatgagctctccaacccttctctttcttggactgctctaatagatatattggtacatttgatggtgtccaataagtctctcaggctttctttacttattttctttgttgctatttttattgttcctttttgctcctctggataatttcaaatgacttgtaattgaattgctgattatttcttctgcttgatcaagtctgtagttgaacccctctagtgaatgttttagttcagttaaaattgcattctttggctccaaaatttctatttggttccttttaatattttctatccttattgaatttctcattggttcatgcatcactttcctgaactcattgagcatcaatatgatggttatttagaattttttgtcagataattcatatacctctgtttctttaggatctgtttctggagacttattttgtttctttgacttgaccatttcccgtttcttcatatttcttagaactttgtgttggtatctgcatattaaaaaacaaaacacacaaacaaacaacaacaacaacaacaaaccagccacttcttccagtctttaccagccggctttgtactgggaaagaccttcataatctttagcctggctaaagattctggggacctctcaaacattttctgtggatacgttttctctgggcttgtgcacgtagattcctaagtagagagattttctggcttctcttttttaagagttcattatctcttgctccatctgttgtctatcttctatagtgtgtgtcctccaaagtagcagcacactgtccagctctttttttttgatcttggcagcccctagtcttctagagtatgttagaccttctctgccttaagtggggctacatggaaaccagtccctttggcagccctttgaaaagccagaattctggacacatgttctatttttctcttgccctcctgaagaagagggcactgagctgtattggcctctgctgtgccacaggtcctctgaaatagcatcatgctatttagctctttggtttcttttcatggggccccaggcatctagagtatgccagtgattcaagacagacaagaaagaaaccaatcctatgggcatctccccatttccccaaaaagcaggaatattggttgcatgcttcactcttttccatgtcccctagggataggccactgaactgtatcagtctgtatctgctgtagcaagaaccctctaggacagcaatatatcacccagtatttttttgttctcagtgtcccccaggcatctagagtatggtgggtcctataaactctctaagacaggtaagacagaggctagtccctcaggcagcccccaggaaagtcagaactttggttttttgttgttgttgttgttttgagacggagcgtcgcttcttcgcccaggctggagtgcaatggcgcaatctcggctcactgcaacctccgcctcccgggttcaagcaattctcctgcctcggccttccaagtagctgggaggaatgtgccagcatgcctggctaatttttgtatttttagtagagatggggtttcaccatgttgaccgggctgatctcaaactcctgacctcaagtgatccgcctgccttggcctcccaaagtgctgggattacaggcatgagccaccgcgcccggccaaaaagtcagaactttggatatatggtctagtcttctcatttcttcttcagggagaagccaaaaactgggaatttcctcctaaccatgtggccctgtgccgagaggacagactatggtgagggtataccgtgaattttcctactggcttcagtgcagttgttttttttgctcacctagtgtgatgtagcctcttagccagcttctggatttctcacaaaaggaattggtctgtgtatagttaagttagtgtctctctgggagggagcacaggctggggtttctcattctgccatcttgctgacgttcactgtggttttgatttgcatttccctaatgactagtggttttgagcacattttcatgtgatattggccatttctatatcttccttgaagaaatgtctgttcaactcttttgcctactttttaattgtttgttgtttcttctgcaaagttgtaggagtttttttaatcatatattctggatatcaatccctaaacatttattgttttaaggaaataaattttgagataatttgttatacagcaatggataactaataaatactaaaaactcctaaatgtatatactaaatatattaattagaaaattgtaatataaaaatactaaaagctaaaactgtctgatattaggaagataattttactacaatatataccttttttgtgtgtatgagacaaggtctcattatgttgcccaagatgttctcaaactcctgggttcaagcaatcttcccacctcagcctcctgagtagccaggattacaggtatgtgccattacagccagctttcacagtgtatacttgatgtactattaatgtactatttaatgactactaaaaagtttatgataacaggagaaaatgcttatgctatcttaaataaaaatttgagtgtatgcattgataccaagaaatggaaatttgagtgtgtacactgctaccaagaaactgaaaaatgacatcccatacctttaatatttaatatttataacaaatgaggtttacatggatttttttatctcatcttatttctgatgtgttatgtagttataaatactattttatttgcactcctgctctgcaataattttgaagatagataacttatattattgctgtcttcattttttaaaattctcaaatccagatgaaattatcaaagttgataaaataatcattgttctatcttcttatttgaagattaataattgtgttgattttgcttccttgctctagttagcagtgatgtcatctgctatttttaaacttccttgaaataatatatgtaatctacttctaataagtttttcttatttagcattttggtctaaactaatttataattatttagccttatttctccatgtttaacttgctttaaagctcagcactggtgttttcagccatggcttctccattttaaggctattttaattcatttattattctggaatatatccttaaataatttatttaggaaggctgtcttggtggtggtatttctgttgcagttgttgttttcttgcctgcttggtgacatatttctattgacttgacacttaactggcatcttatctaggtagataatgctaattcaaaattctgcagatattgttctgttgttttttgccatttagggttgagtaagatgccaagttgttttttgtttctctgtagtcattctgttttcattttgtttttagctttgcctttggaatttaaaatgttcaaaatgatttgtctggatgagaatcgattttcataacttttgctttgatacactaaacagtttgagtttctagatgatgcccattttaattcatacgaggaaatatcttctagtatagtttctgcttgattaattctatgtttgtctcttagggacatctattaattttataatgctgcctttttttcagacttctgtttcagaatattcgctttcatcaatgtaatccttggctatagtaggaatgaaataataaaagcagtagcttctgtctgccctccttggttatgcagtccttacagaacatctccccatctcccatccccccaccccagctcagtgaaactctccacactttggttgtggaaattggcagggttaggtggctactcactcccaatccacatccacaataaatcactttttattatcttatcaaaatctgtagaatgcctctttattctattttgttgctgcggaggtttgttttctctttctaattattttattttctaggttttttgagggaatttcaagaggggagattttttattcaggctcatcttaacgtcatgtctggaactcaagctactgaattatatattctttaatacatatagacctacgtcaatgagtttaaactgcaaggaaagggttaaatttcttcctcaagtgtggtcaaaatctgtagagaaaagaggaacagcttctcttaaagaaagttagctgggtaggtatacagtcattgccgaggaaggcttgcacagggtgaaagctttgcttctctgctgctgtaacagggactagcacagacacacggatgagtggggtcatttccagatattaggtcacagcagaagcagccaaaatggatccccagtggtgagtaataattcttattctttgcagagaagttatgagttgtgactgcagtgaaaggctgaggttgaagatggtgctttgatgtgtgtccttcacttagttcctaagtggagaagctttctttttctacaaaagatctttggcacataaaggcaagaattatttgcaatgcccaaagcagttcattggtggtagttatatatatttttaggtgcctaattttggttttgtaaatctgttattcaaatactgaatgttacagtcattgattttagtgaagaatcaggaatttttaaaatatctgcataagaatgacaaataacagggaatatgttttttgtctaccagggtcagtttggtctgagggtggaggaatgagatagagaaggtagagggagagagatcaagaaaaagaaagagaaaaaagaggtataaggagaaaatgcaaaactcagttaatatgtcataatcaggccatgggagattctgggcagggttgggtagtggaaggaggtagagtgattaaattagttaccatgtattgaacatgcatgatgtgctgggtactttactagtgctatttcattgaattttattcttcacaatgacttttggaaagacatcatcattctttttgacagatggggtaactgtggcttaaaaaacttgcccaagttcacactattcataaggggtagagctaaaatctttcctgcccgcttcgtggtgcgccagaaggtttctccatgctgtggagacttcctggaaggagtcacacccgcccttctcttgggtggtggcagctggcgccagtcactatgtatttatttatttttaattatttatttttgaaacagagtctcgctctgtcgccaagctggagtgcagtggcrcaatctcagctcactgcaacctccgcctctcggattcaaacgattctccttcctcagtctcctgagtagctgggactacaggcgcccaccaccacgcccggctaatttttgtatttttggtagagacggggtccaccatgttggccaggatggtctcgatctcttgaccttgtgatctggccacctcggcctcccaaagtgctgggattacaggcgtgagccaccgcgcacccggccgtcactatgtatttataattactgttctttgaaaatcgaagtaactttcatctacccagtgcttactggtttgagaaaaagctttgttgcttttatttcagaagattaaaatttaattttccagtaaagattccttttgctccagtggaattttgaagcgttatacttgtatgaagaaaaaaagaatttcaaaatttataatttttgtggtaccrtagaggggatactacttaattatgctagcactgtctgcagaggtctaaaaaaccataggctgctgtctatattgaacttgttaagattccttttgtttcacagtgcctgaagattggtcatgaaccagtaatagccattaaacaatgtctgttctcataagagatgaaataaatacaaattaaaacaacagtgaagtatcattttttctctatcaaagagataaatattaagttttaaaaagcaagcaatcaagaaccctctatcttgctaagaagggaggattatttgtaccctagttgcgcactagtggtgatatcatctttctggacaataatctagtgatacatatcaaaagcctttaaaatgtatatgccctttaaccaagcaattcaccttttaggaatttattctaagatataataatacatgtttgtaaagttttagtgatggatatttttcttgctattgtttctaataaggaaaatcttagaaacaatttacgtgtttaaaaacaagtgattggatgattatggaacatccataatggaataccatgtaattatttaaaattccactgtagaacaattcataatgtgtttagttaaaggggaaaaatgcagaacgaacagtgctatcacttttatacatgatacatgtatacaaacaatattaatcagaaatataggtagtttgtattttctactgtgtgcttttcaatttgaatcccatctgtaggcagaaaaataaagttaaatatttaagatttaaaaaaaacaatagctggtttttttcagagaagtaaccatctagtgatgtgtgataatttataagttgtgagattccatagttagggctttagccctttgcatttatctttcttcatctcttgaatcctcttcaaaatacacccactctacccataactcattagatcttgaaaggcatgttctgatagaattttatatttagaacaggctgsagcactcttcccttattttacagaagtgattgcatggctctctagggtgagttgcatattgagagggaggacagtgcagtggctaagtggccgcacattgaagccaggctgctgggktttgaataccagttccccaacttcctagctatgtgattttggacaagttgcttaaccattgtaattcccagtttcttgtctgtaaaatgggagtatggtaatatgtcgtaaagtagttgtgagattttaatgagataatccatatcctgctaagtactcaggaattgttagtagtttttattactattactgtttggattaagaaacagaggaaaagtgatttgtccaagattatacaaccacttaatggcattactaagaacagaatggaggaaggttttttccagcagaaatgttcagtatcctctgtgcctggcaggacaaccccaagttgtgcttttgggatggaggagctgatctaaaacaagcagtacccaggacaaggccagcctccagggagtgactgatgacagtgggaagccaaatggtagaaaggcaggtgaagttaaggaaactgagagtcaacttaggagcaggaatgaagcctggagcaaagagctagtgcaagagagagcagatgactcagagctactggggcttttgtaggccaccagctatgggcttcacgggaggttaatgtggtttaaagtctcaagacctgggtaattaaatagacaaatggggtctaggtgcatgggggaattttaagtatagctttgagaagatgcctaatggggagtaataatagagaaagaagctgggtggggccagaacaaggagcccacagtccaggcatccagctatgatcatcctaaaggaacagcctaagtttgaagaatcataaacaaatagagacatgataaaatttactttaaaaaaaatcccttggcagaagaatgaaaactgatttggagtgacaaggagatcatttaggagactattggagtaagccaaggagaaatggcgagggcatgaaaccagggcagttatggtgggatcagactggagaggatgcatttaagagatattttagcaccagaattgacagaatttggtttttgacagatgtagacactgggagaggaggagagatctaagtgcatagtggcatccttcacaaaatggaaggtataggaagcagagtgggtttgcgccaggcagagagaaaagacagatggtgaattccttctctaacatgttgagtttgaggtgcctgtggagcagctggatagagatgtccaagcagacaagtagatatttaggtgcaagttcaaaaaagagggatggcctggaatgcacrtgaagagtcttctgcataagtatggttgacagttgaaattctcattgtgggtcaattcagtagcagagaggttggaggattgagaggaagccaaggacagaacctggaaaaccttgacatctaaggagggagatgaggaagaagaatctacaatagatactaaggaggggctagagagactggagcagcccaggagaaaagtggtgtcatagaaatcaagtgggcctgtagtcccagctacttgggagactgaggcacgagaatagcttgaacccaggaggcagaggttgcagtgagctgagatagcaccacggcactccagcctgggtgacagagtgagactccgtctcaaaaaaaaaaaaaaaagaaagaaatcaagtggggagatggatgcaagaaagaggagaatgcattcatggaaagagcatatttaccaagctttccatgttgaacacatgagatgtgacatgaaaggtaactgtagtgactacatgttaagcgttgaattgtggctcccttaaaattcatatgttgaaatcctaactcccagggcttcaggatttgatcatatttggagatagggtctttacagagataataaaatttaaatgaggtcattagggtgggtcctaatccaagacaattgttgtgcttwttgtaaggaagggaaacacacagcggaaaagcggtgtgaagacacagggcgaagacggccatccacatacaagccagagagaaaggctcgcaacagattctttcctcacaaccttcagaaagaaccaaccctgtggaaaccctaagtttggactcctggcttccagaaaaaaaataaattttttttgtttaagccaccccagtttgtggtactttgttaccacagccccagcaaactaatacacttggtgagagtgcatacagccagagaaagaagctgtgartaagtgcatcagggaggagggaaagaaaccaaaacaggattacatcacttaaattaagagtagaaacatttcacaaagcagagtgtagtcacaggtcaaattctgcagaaaggcgaagtaggagaatgactgaaaatgtcagtccagaggccctcagtgaccttgacctttgcagaacactcccagttgagtggaggcagtagactttggagagcttggaaaatggaggcagcacagatggtctcctgcagaaagtctggtgataaaatgagacctcctcactggagtaaactcacctctgctgtcggtggaaataatctggagtcaggccagccagacccagagttcttccttcctccattttaaaggttaaacagagctgaggtcaatggctcatgcctgtaatcccagtgactcaggaggcggaggtgggaggatggcttgaggcgaggagttccgttcaagaccagtctgagcaacatagcgagactcccattcctaaaaaaattttaatttaaattaaaaaaaaaggctaaccaaaaataaaatccaatactttatttttcccacccawaactagtttgggaaggatttctggaagaaaataatttttgcagtcattttacatgttggattttgagtgcacataacatacagattctattctgtattatcagttcagaggcaagttgagatttgaggcttcgcagaggtaaagcctctggtgaatctggtgagataaagaagaaaacaagcccaagaggaatttcagggatcatttataatttacatcaataaacagaatgggaaaaaaaacccattagagtttggaatagagaagtattaaaacactttcttagaaagctttgagtcaaaattaatctttctgtagtggcaggaatatgataagccaaacaaccctaatgtcacagctctatattattaggtgtcgaatcagatttgcactaaaacatcaagtaaaaataaaaggaatgaacatttggttaagtgaaccaattagtcaatacacgccagaaaatggtaaaactggataaacctaaaatactcaactacctagattaatcaaggccaacctagattatcaccccaatattacaactattttcaaccaactaaacaataaatctttatcaagagcctgatagtttaaggtactgtgatgaatacaaatgaaattgctgatactttttttcaagtctatttagaaatagaaacccacaattatgaaatgacaaaaacaattaatgcagttaataattcagtaacttttaaaaagaaataaacatgacaaaaagttcattctcaccaaatactaaagaaatgccaattcaaacaccaatgagatattttcctgtatcagattagacagtaaaacaaacaatccaatcagaaaaatgggcaaaagatataaaaagacatttccccaaagaaaatatacagatggtgaacaaccatataagagagtcaacatcatttgcctttatgaaaaaattaaaccactacctacctataaaaatggttaaaataataaaagataatgacaacaccaaatgatggcaggatgcggagaaactggatcatgcatacattgcttgttgggaatgtacaatggtcaagccactctagaaaacagtttggcagtttcttataaaaccaaacatgcatttagtatatgacccagcaactgcattcttgggttttgatcccagagaaataaaagcctatgctcctgcaaaaatcagtatatgaatatttataccagctttattcataatagtaaaaaactggggaaaaaagtccctcagtgggtgaatcgtaacacaaactgtgtgtgcaagatgttaccactgaaggaagctgggtgaaggtacacaggacttccctgtacattttttcaacttcttttgaatcaataattatttaaaaatgaaaagtttaaaaagtaaaaaaaaaaaacaaaaactaaaaatgttcatcttcactaaatattaaaaaaaatgccaattcaaacacaagatattctccttttacaaattaacaatttatatggattttgggagggttgggagtaatcatgctaataagtatgcaataagaggatactttcgtatactactgattrtgggaatatgaatggggagaacatttctggaaagcartatgtcaacaatatcaagagtcttaaaaatggttgtacaagcagacacccattctgggcactgccaatttctccatgtccttagtacattttttttcagttcattcagcatctttgttccaggcactgtgctaaacattaaaaatacaccaaagatgagtatgagtaaacatgatttctgttctcaagaatttcagttttgtggtaaatatatcaaaggtgattttttataagagktttttataacagggtgtgacgtttcataggagcatgaagrtagctgtttcctatttgtctgtaggcagtatgatgtcttagataaatgccagggttttgagctagtttggttggtatcaaataataagtagttaataaatcatcttctatttattagtggtatcactttgggaagcctattagcttcctgaacttcagtgtcctctgtaagatgaggctactaagcacttgccaatgccatgaggaatataacaatttataatggacaggaagtcctatggatataagatattttaggactcrcattctttgctttaaaatctattatttcctatayttttaattgtcagagttctttagctctgccttttctgattgatttccagcagatggactcttacctataacctagaagttgctatagtagacctcctaactatagataagagaagggcatgccaaatgcagttgaatcaggtgaaagtcaagcaacaaagcygcctaaaataaattttatgtaaggtagggtgccaaaatcattaaaataaaattctattctataacwgtaatcacgtaagtgctttcatgaagttgtctatgaaaactttctttttcgctttctggacttcaaatattttaagtttgcttttcatttacaaagatttttttgctcattagtaatcatgaactgtattcaaacttacacttctaattctagaagatatataaactaccattttttaattataaaaatgtttatatatcttgctttaataatttcacctctagggatctagctagttaaataacaagagctacggaaacatatttgtgcaccaaaatgtttattacattatttaatgtaatgaaaaataagaatcaacctaaataagtagaagaataggtaagtaagttaaaaatgaagttaataatgactccttaatgagagaagacaacataaggctacatacagaattgtaaagaaaataatccacagaatgtgtgttttattttggtaaatggttcctaaaactaagtaagtacatagaaagawttttttttttttttttttaaagacagagtctcactcacgttgtcacctaggctggagtgcagtagtgcaatctcagttcactgcagccttcacctcccgggttcaggacacgccaccacacccagctaattttcttgtatttttagtagagacacagtttcatcatggggctggtctcaaactcctgacctcaagtgatctgcccaccttggccttctaaagtgctgtattataggtgtgacccaccgcacctggcctaggaagaattttagaaagaaagctccatatcaggaattgagaagccggtgttttaattgagaatatatttgcacagaaaaatcttggcataaatattggtttacaaaacaaacaaacaaagtaatgtcctttaatcttggatcaggagctgcccaacaactccaaaaagtcagctcatgcaaaaccatccaaggacagatgaatcagccaaacaagagagaaaggggaagggaaagtgtcttttcacaggcagcttttgaggcagtgcataaaccatgcctctgcaccatccagaccagacagttgtgacacagggttgacaaagcaggacaacgaagggtagctgctcctaaggtggggatgatgctggagcaagggggagcaccaagaggaaaaaaaaaaagcataaaaataagatagcatagtaaaaaataagatagtcatagtagttacctcttgattgatgggattatggaaatagggttatttctttgactaaaattgccagatcttcagtacaattacattgctctgctgagcaggatgaaatcaagttgaaaagtaatctagtagtgaggtacagcccgtatgctgcaaatggccaacatagatcctcagatgacagaagtgagtgatgcaggcctgtggtttacgtacagctccatgacgtatgaatggcagaagctgtgtatgtccayaggcgagccccatttcaagaagtgcttctggtcaccactctgttgtcctgtgtataaggatgtggttcagaacagccaagtcttatatttcaagaggagccagaaagacaaacttaccagtgaaatcctaatatttatataatagctcaatatctggaggggctggtttggtataaatcaccagttttacctctgacctctgttaatgcatcagaggttcaggagagagtgagaaaattgtaaatggaatattttaggactaytatattggggcccaggctttagtgagtcagagcgagaaagtagggggctgaaactatttgactattaatttattcaataaagttttatttaatgttggaaagatgaagatgaatcagatagaaatcctgtttagaagcttctatgggaagagatatcaccatagctaatatgtcttagcctctaaaaggaattatggcaaactatattgtatcatatatgatctcatttaatcatcataactgcaggaggtaagtagtattatccctgattttccataagtgaaaactgagtctctcttagttacatagctgacaacacaaccrggattccaaatgccagtctgatcccagagccaagctatgaacaaccatgctatatattatggcagatcagggaaggaagacattacttctagcagcaagaaacatttgtggatgaaaagatttgagcttggagagagctgtgttgagccatgtccaaaacaatttytggcaaccatacgataaaggtaaaagccagagattgaaaagtaaaagctggtggactaaaaatggtccatagacagagagtcatcaaaacaacaaaacaaaacaaaaaccttaatcataattaattgccaatatttcaaaagtctggagaattcacataagtttagatttccagctcttctggagaattagaatatctagtaacagtgtgctaataatmccacatggtaacaactggtgaatctggcagaggctgcccagcttccaatggtgtataagctctcctcttcctatgcaacctgcctgcctcatttatatgagctgcttggatgctgcagatgcttgaatctaagagctttggtctggaaagtgaggccctaacraggaagaaggaataacctatggatcaaggagaactgggagtccagaaatgaaggttatttgtaagtctggacccarccattccaactcctttgaggaaataagattctaaggaaaaggccgtttgcattctgctctccaagatctctgggtgttggaagaaactgaattgggggagagggggaaacytgactgggggctcaatacagacatgtaaatttgaaggaaacagagagtttagatgacaggcagtagaaaagttaatgtgtccattctatggctgacccaagattctgtttccagaagacctctctggcttgttaagtgttcatggttgcaggggaaaagttagaaaaaaagaaaaacaagccaaaacccagctccttaaatgtttctaattttattttcaaacaatcaggcagagtaatccctttacacactcttcaggcattggctgagggtcccagtcaagaaccattcagttttgggggccttaagaaaaatatttcctatgattaaaggaactttggacaggttattaccttctttgagcctcagtttctttgtcacttagaaggttgaatggtttccacattctgagggtaaggaatacgagagtgaatgaagaaatatcaagtgcatagctcagagtaggaagaaagaagtgaccagggacaaggctaagaacttactcaaaaggtgcccagctgctcagcattctgtccaaaaaagggacactgacatctctccagcattctaacagcagtcacatagcattatcagctagaaatgaaaacagattcaattctatatcctgctaaaagcttgagggtcacactagctgtgtgatctttggcagctggccaaaaccctctgaaaggcagtttcctcacctataaatttttwaaaaaatatttattgtgaagattaaatgaagtaatgcatttaaaatacttagggtgccttagagttccagcacagttcgtagctcatagtaatcagttaatagatattgactttaataaatagatacttaactgagcctccaccctgggcctgttactatgctaagtaccaggagtgcaaagggaaatgaaacacrttccccaaacttgtggaactcagagcaggccaactatatgagtagtagatttttaacacgatgaggaaactgttataatggaaaaataaatagtgtgaagagggactaaggaagataaagatatggtgaaaaaaagagggttcaggctccaactgtggcatgatctagatctgcaaggaagagtagagaattgcagtagagaaagcagggaagacattccaggcagaagaaacagcttccacagaggtaaagaaggcaaaacgttttcaaaggttctaggggtgggggatggtggggaagatggtcacggaatagtgaatggttcaagtgaaactgttgtatgggttgtgagggcagttttatgggttgggtgataaaatcagaagagaaaaattgaattcacgctttgaaaggccttgtgtgtcttgctgagaagcrtgaacactaactcatgaggagtaaggcgcgggtctttaaaggaaggaagtttcataatcaaattgttttccatgaaagataatgaagggagccagccacaaggctgttgcaatcaatcgtccaaacaagaggtgacaaagactctaaaactggccaccaatgaattgaaagtggatggtgaggaagaaagaatacagggtgacataaacacaatatgtaaaatccaaggtatgaaaatggcctggtcccttcgtccttaccacagtcatcccaagagaccaaaacaaaaacacagaaaatctcttttaaaaataatctcttttgtttgtatgcaaataggccatccacagtgaaaatgcaactcaaatgcaatattttatctgcagtccaccaaatgcaaagatcaaattggtttacaaatgctgtccttcttaaaaattccaactcctcacattaaaactgtagccagctagtgcaagttaagattgtttgcaatcttaaataagatttgagtaaagctgaaattgagacacttttcaaaagaggccatcccttactcacattgctgaagagtagaaagattgacaccttcttttatcagaaaatttctttcagggagtaatgcctcttgtgtggtggcagacccttcaagtcttccagataaagcatgtgatggaagtagcagggagctgcaaaaattgcaactctatgattctgcatcaccgacttgaaaactacaagcccaggttgacaaatgtacattttaagtgttcagagaagtcttaagtgccttgctttggtcacaaagttgccacagggaagtaagtttttgaatgtgcagtgccccgtccccagctctgttgtgaaatggaaactttaaaaaaaaaatcactgatttaaaaaaccactggttttgttttttaacaagtttagtcatattgcctgtgttctatataccccaatctattttattttactttgtagtgtacatttaatttatactcaaataaatattttacataaggtgctttcacggaccttcatgcttccctaaatattaaatatgctgcccatttgttaaaatgtgttagttttgttatgtattatatcccttcccctgcacacatagaaaaaaaaaatatgaacttaaccttcaagcaagttttacgtttagaatattacctcattttatttcttctaactgaggttataaagaaaatggcaaatgtcatgtgctttgtaaagaaatgacagtttctcagaatacgtaaatgcacacccttagacaaataggccacttaaattcagaatcacagtcttttgaatattggtttaatattctcagataaagattgaaaggataacaagttttggaatcaggtgtttactttgagttctgaaaggtgacatcacaggtgttggtagtttattgatatttaatttttaaatgtgctgckgtatatatttcatttgattagaaatatgttacatagttatgttatttgttaaataatagaccatcttttgtataacctatcagaagaagttctgagattgtaagattagattgtaaatcctattgcataactagaatacagaattattaaattggaaaggaagttaaatcacttagaccgtccttcccccaggaagtcctctctacagtgttatccatgacaaatgtttatgcaggcaccctaaccatttaaaatacgaagagaaggagaagagatatatcgagaaaactattcctgagacaagagaccaggggaaaacttttcttagttgtaacctacacaactagctagaatctacctcatgctcttaagatggtgtttaatcatgaggatatcatacataactgaaattgtataatgttgaacatcttttggtggcaagtaccttgactttattaaatcagtgtaggtctcctgcattcaactatggtctctaggagggcagggaccacacttcttagytcaccttggatctcaagaccagtccaaggccttcattcagtcagagctagttaagcatttgttaattgaatgaaggaaattaaaaaaaaaaaaactagaaattccaaattgtgcaattacatctgtgaattttaaggtgttattggaaaatgggaaaaattactgagattcgaagatggataggaacaaaggtaaagcatgaaaatgtgcatatttgtgtgttgctagagtcaatagtgattgccagttcctatgcagccctggcaccacctctgaaaccttggccaacccctgccattaggtgttgagatacacgacaggcaggtgaggaaggaggggtgctctggatgtagtcttgccgctagactgtggtctttagtgtccatgtccatggggtgagttgtgagcccatcagtttcccacactacagtccttctctggcttagccttccttccctgtcctgtggtccaggttacccctggcccctgtggccttcctccagagatggaccttcctccacacacttctcaggagctcctgattctaggcatgccccagaacacckcaactccactctgccctgtctccatcagaccagagacctcacttagaccctgggtatggggttgttggttctccacttgctgcggttgtcactagcctgagctctatcctgagctctgtccatccttctcatcttcctcattgccctttctgctaaagcaactgcacatctgaaggctatacttatccctagtacaatggtactttttctaaaatgcatacaccctaatgcttacccttttgacaattttttcctgaacctaccttttaatataagcaaattcagtcttcaattcaaataagtgtattttgctgctgaagccaccatgtgattttgagagatagtgaagacagacagtcttctgcattcacttgtagaatcctgaaaatacctcttggtgtcccttgcctttctgacttcttgcttgaagacatctagacaaaaatgtgtccctgggtcctagtttctgggttcagaaattgatcgaatgcaagaaaacaatacacattgcctcttccttagcatgcatgaatggtaggtgtgaatttgcatcatgagaaagtaaataaaagaagattccccagggcagctagggaggcagaaaaagccagcctaggatgggagtggaggacatgttagaggttatgagagtgagggtccatcctaccccacctcggtaactcactggtatggtataaatgcaaaattttggctcacacaaagaaaaatactcaacttctaatgcttaactatgtaaaatttgcttttaaagtacaagttaaaattgtatcgcccctcaaagaaacaagaaactcattacatttctaagaatgttccttcagaaacatggaactgaaagctatttttaaaaattgatctggcccttagaaaactggggccttttctttaatttacctaaggaattgacataaaagtctagggttctgcaccagaaaaatgcagaaagtgtcaaaataaaaggcagaaatacaaaaggagactttttgcagcaacgttctatgtatagcattgattccaagggtgcaacatagggaagtgaacatgtggactgtgaaattgatgctaattttctttcccactagtctagcagccctctaaaatgtcacattattaatttagttactttaccagaaatccgtgtatgtggttagcatgtgtgtttttttttaattaacagactttacttatttttagaacagttttagattttcaaaaaattgagcacatagtacgagaattcccatctactccctttgtggaacacaatttcccctatttttaccatcttgcattagtgtgatgtatttcttacgatcaagccattgttgcttcattattattattatttaaagcccataatttacattaagtttctctctttgggttgtacagttctatggattttgacaaatacacaatgtcatgtatccaccattatagtatcatacagaatagcttcactgccctaagaatcccctgtgctctgcctgttgacccttcccacccctccccaacccctggaaaccactgatctttttactgtctccacagttttgccttttccagaatgttctatctttggaatcatacagtatgtacccttttcagattgacttctttcattaagcaatatgaatttaagttttctccatgtcttttcacatcttgatggctcatttctatttattaccacataatattccattgtctggatataccacagctttaccaactgaggggcatcttagttgctaattatgaataaagtggctatacatattcacgtgtaggttttgtgtggacataagtcttcaattcaattgagtaaatatacctagaagtgtgactgctggatcatatggtaagagtatatttacttttttaagaaactgctaaactatctcccaaagtagttttaccattttgcattcttttctttattttttttttattatactttaagttttagggtatgtgtgcacaatgtgcaggttagttacatatgtatacatgtgccatgttggtgtgctgcacccattaactcatcatttagcattaggaggtaaatctcctaatgctatccctcccccctccccccaccccacaacagtccccagagtgtgatgttccccttcctgtgtccatgtgttctcattgttcaactcctatctatgagtgagaacatgcggtgtttggttttttgtccttgcggtagtttactgagaatgatgatttccaatttcatccatgtccctacaaaggacatgaactcatcattttttatggctgcatagtattccatggtgtatatgtgccatattttcttaatccagtctatcattgttggacatttgggttggttccaagtctttkctattgtgaatagtgccacaataaacatacgtgtgcatgtgtctttatagcagcatgatttatagtcctttgggtatatacccagtaatgggatggctgggtcaaatggtatttctagttctagatccctgaggaatcgccacactgacttccacaatggttgaactagtttacartcccaccaacagtgtaaaagtgttcctatttctccacattctctccagcacctgttgtttcctgactttttaatgattgccattctaactggtgtgagatggtatctcattgtggttttgatttgcatttgtctgatggccagtgatggtgagcattttttcatgtgtcttttggctgcataaatgtcttcttttgagaagtgtctgttcatatcccttgcccactttttgatggggttgtttgtttttttcttgtaaatttgtttgagttcattgtagattctggatattagccctttgtcagatgagtaggttgcaaaaattttttcccattttgtaggttgcctgttcactctgatggtattttcttttgctgtgcagaagctctttagtttaattagatcccatttgtcaattttggctttggttgccattgcttttggtgttttagacatgaagtccttgcccatgcctatgtcctgaatggtaatgtctaggttttcttctagggtttttatggttttaggtctaatgtttaagtctttaatccatcttgaattgatttttgtataaggtgtaaggaagggatccagtttcagctttctgcatatggctagccagttttcccagcaccatttattaaacagggaatcctttccccattgcttgtttttctcaggtttgtcaaagatcagatagttgtagatatgcggccttatttctgagggctctgtcactatacatctactagaatgggtaaaatccaaaaatctgacaataccaaatgctgctgaggatgtggagcaacaggaagcctcattgctccacatcctcagcagcatttggtattgtcagatttttggattttagccattctactagatgtgtagtggtatcttactgttttaatttgcaattctctaatgaggtatgatgctgaccaccttttcatatgcttatttgctgtccgtgtaccttctttggtgaggtatatgttcagatcttttgctccttattaaattgggctgtttgttcttttatctttgagttataagagttcattgtgtattttggataccagccctttatcagatatatcttttgcaaatattttttccccaatctttggcgtgtctttttattcatataatggttgatacatgtttctgctttaaggaggaagggttttaaaaatacaatttacagtagcagtaaaaataaaaatttattgcaaatgtcttatgttcactctcaggtgatgtcagggaactatggacccagcagggtttaattaaaggggagtgtcaagtcctgggggctgtggttgacaatcctcctttattggcaattgtgcagcagggctgggagtaagaagacaacccagtcctgagctgcatcacttctaaattaagaataattcaggaactgtgtttacggtgaaatcctggcccttctcacatagattatattatgcataggatatgaatttctgtccatgaatccaagtatatatgaaatcatcactttgaaaatttcctttaactcaacttaatcccactggtgagcctcaatcctgccagttgaaaaagagactgtaactgggtcatgcaggagtctccttcctttcctgcagcccagtcagaattcaagaagttcacctggtaactggaaaatgatggaagggcctcaagtccctagtctgtcctggttgccattggcacccttactatctgagcccatagtggtctgtgaagtccggcagctccctgcccccatgccacagtggggaatgagaatatctactgatgctgggccccatgagcaaagcatgctgcctttctaggcatgagccatcacacctgaggttgctaccccctcgggagcactgatggaggggcagttgggtttctactgctcacaggacccagacaaccatcccctgccctcccttcttcttgcacttcaaaagcactctcttcctctcttttcacctctaagccacmrgtatcatctcttccatgggctttcacaaaagtctggatgaacctttgaacttgtatctcttctgctttcccccttgcatcaagaaagcttagaaaacaaacactaattaacgtttcaataaataatgctgctctaattatttgtggaaactattctgtattagaactaccatcagcaccgcctcctagagtgcttttagacttgaccactggccgcaggaggccacttccatataacaacaaacagatggctgaaattggaaaactcagctaartgttcagatgtttctagactcccacggrtttctggctctggcacatggagtagatcctgactgtgtggtcctcaggggactctctctggtgaagtttggtgaggtcaacttccacacccacacacaccagctactgtgtgtagcctgtcctcctctggttgcttctacttgcagccttggcctcttcagtcctgagagcgttggagaatgaggcagtggaggaagcagccccacacagaaagcagtttctgaagtaacctcagcaacttcctcctcaccaaacacaaggaactgatcttctccactgggctcggcctctggtcagccaaggacaacactgttgaccaccatcacggttggccccactccacccttggctctgatgacatatgtgggagtcagaggaattttgattggctgactgctggcctgtcacacaaacaagatggggcaagggggttgcgatmtgacttgacatgtgaaaaaaaaaaaagccgtggtcagcaaccccctgcaactgttgaaaggctaattcaatctctgactctttaacaaaagtgatcttgttcactgcctgttctgccctgagagccttctctgctaggaggtaggttgactgactcagggagaagggtgctggtggcagagctgccaatgggtgagggtcctagagactatcgacatgaggggcagttgagaacactgtagtatttagctgagaggagagactattaataaaatttacaaaatcagctttcagctatttggaagggtttatataaaaggataaaataatatgtyctggtagttctagaaaacaggacagagacaagtagctggtacttatggattggaggagtgagtggcagtagtttggggattatttataaaaaagacatttttctgttaactctcttttctaatagtgaatttcccaacctgacaagtaagaaagcacaggctagacacgcatctgtcatgacactgaaggggtccttgcttgagtgagagactggaatgatgagttttgaggtcccttacagtccagcaactctagctaagttggagaataagagaattccatgacaccatatcaccccctcatttctgctgcctgcctcaccattcatctctctttactccttttaatatcattctacgttacagcattggaggaggctgctctaaataggaactgaaataagtagattaaagaagtgctatggaagggaaaacaataaaacaacttgttttttaagagcctactattgccaggatctgtgctaagcaccatatatatgccatgttatttaaccgtcatgacatgcctatgagatatttagtattacttctgtgaggaagccaaagctcagagaggttaaataactgccccaagaacacacaggcattaagtagtggagcagggtttgaacacaggtctctatgactccaaagtgcagtgtgatatgttatttttactgatctgtttatggaaaatgatactgctttctaatttagtattaacacaaagatttttttctaaatagatttacttaaagtatgttataaaaatactatataaataatgaaacagattttacatgagtatgaagtggtactagtagctagaatgatgaaagtttggggaatactactccaaatattttgatagctagcctttcaatttagcctgtcttatatttggactgctgagtacaaggaaaagaaggaaacatgaaaattaagtgaaatatgagttacttcccctgtgctctgataggtgggtaattgatcatatgtcacaataagaaaatcaaatgaaccctttcaaacaacagcaaaatctgtgattgtaaaatccagaggaaaaccccaggtgggatctatctgtatgaaggatgaaatttccaaggtctgaacatagaatggctgagaggaagtgatgaccctgtgagtcaagaccctggaccctgggggagccctgtgggtttgagaagccctgggtgaaaggtgaagggttttacaggcctgtttacagacctctgtagtgacagaagggagatctttgtgcaaaggtcaaagtaagaattgggaaagtctgaaaagaaaacaggaaagtaataatgaagatgaaataactacttggcatactctgccacatgatttacaggcaaggtttcctttgtttttcacaacaatgcagcaaagaagtgattatgagtcacatttcataagtgagaagactgacattcaaacatgttcaataactggcccagggtccagtggtcaagccaggactggacttcggaccaccagttccaaacccacaccccttcccttgcaccacacgcttttgtgtggatgagcctccccaaccctgtcaacaacaaactgtcactttgtcacttttaatgtctcctgcttcacaggacacagctagcctccaagagatcagggaggcatgcccagagggtgctgcttctctcttttgaagctcaagtgccacagacctcagaggcacataaatgtcccccacactgagcagaggactttgcagtgcctgatcagggcagaaaaaggaggcatgcacctgggggaggatcacatacgagtgaaacctgtccccrctgaagcactaggtttggagaaatctactgggcatttacacacctttcccacttctgcttatgacttgtagccaaactcaagagtaccacccacttccaggaatagtgtaccaaggtaacagaaacattctagattcatacaattggggttagattaggatcatctgaaaatgaaggttgtgtatgtcaattgccttctaacaggatgggtggagagatgtacttaatgaatgattttggggaagggctagaagtgaagcacatggcctctctgccctcactcattgaaggctgtcttctgaagccccgtggagctcartgcctgtcacatggttgcccacatttgttgaactgaactgcattttcatctatgggcttcaaaggctgtgtgtactctgggatctctgggaatctgtcagggaagrtgtctttgtcrtgtttgtggatggggctccctttgggggtttcccagggctttacactcatgctccgagggtacgtttgtagtcattctcatcagtggaaatgcccacctgccggcagaagttatttggaaccaagcaagagcactgtccctggctgtggtgttgtttctctagtcagttcccctttctgtatttgagttctaccgtcagtcctggcattatttctctctctacaaggagccttaggaggtacggggagctcgcaaatactccttttggtttattcttaccaccttgcttctgtgttccttgggaatgmtgctgtgcttatgcatctggtctctttttggagctacagtggacaggcatttgtgacaggtatgtttgtggaggctcagacgcctagggagtggcatgagataaagctgcaagctgcatctggggcagaaatgctgatgtgctaatggccggccagagaatgagtaaaagggattgcagagagcatgcttaaaacctctgaccatcaggtttgcttctcagattgactacaytggaggtgggatattacaaaaatctgtctcttcctgccagatcccttcatctgtttttcgtgagctaagagacaaaataggcaggaaatagaaggtgccacttaccaaataattggcagctgttcttggctttggggtgctggggtctccgagcagcctctgctctagaagaagcagtccaaagatgtcagctcgcctcgcctgagtcccctgtgccagtgggaaatccagagaagggggatttcctcctcttgcagcctctctgcaatggacttacttggctttcctgtttgacctttcccttctctggtccagagacccttccccaatatttcttcccatccaagtgccccatcccaatattagccccacttggcaccagagaccaagatctaatttaaaaagaaatattcttgggtcaaaaaagagcccaagcaagtgattgaacataatgtgtttcacatacggtgaacctatttgcatttgcatttgcaaacgggcttaaaatatcatctctattaatagcaatttaaggttctggagagccaggtgaaaatagtttttgacaaagggaacttcctactccccttaaactgtaataatgaaggaaatgaactgtttatcttacatgtaacctcaatcttgggactaaggccctgtactaaaatgcgtctatttatgtgctcagacttgcagttcgtgttatgtctgctgctgcagataccgttaatattatttatgtgagctatcctgtgtataatggaagcttttataaatctctatttatttattcctaatatagttattaagtgcttgctatgttccaggtactagggacttaacaggtagcataaaagacataaggaaaagctgcactcttgttttctagcctagtggggaaatcacattaatttaatcacactaaacatgactacatagcaatagtgctttaaagggaaggaaattgttctatgtgactatatcagctgattaattaccaagcctttgcatttgatattttggttagtctattcttcttgaatttcatatgcctcttcctgggtgggggtgaggatgggattttatggagttgaggctagggcaggtagggagaaaacatgagaaagatgaagagataagccaagccagattcttcagcagaaaaatcaaggttgaaataccatgtttcaaaaatcagactgaggtgggagttgaggttaggggtccctaggccaggggattgaagcttcaaagagataaaactagagcaaaagcaagcacagagagtggcagagaggtccctgggcatttttccacagtccattctagtgctggcaatccacctttcatggccaggcaggtaagagtatttgtggggtgggagaaaggacagggccataggctgggcacacagccctttactggcccttatctctcctctcttctcctatacagtgctgtttccgaactgtacattggcttacactcgggctgaggtttgggaaataggcrccattttgaatatgtgtggaggaagaaaagtgtgtcttcagcactttccacctccccatcacggccctgagacctcaacaccgggaagcatctcgttccctatcggtcctcctttattcatggacggatatgattcctttctaagttccatgtcctttttagataaattaacttgaacctaatgcctaatggcttaaaaacaaacaaaaaaaaccctcttccttccagctagcatttgcattttaacaggggctttcaaaaaatgccttagcccaaggaatgagtaatgtgggaattccaagcagcagggtaggactggtgcacagtatggggagagaaggcccctcaagttgtggccctgaaatgttggcttcctctctttgaccatgatgctgtttctgagaaaacaagaatcaggctaccttaggggaccaggatgggcatggctcccttttagtgagttctatgagcctcatacctgacagtcagagccctcgagtggatgagcacagactagaagaagcactgtgaaactttgcatgatccttacctttttggcaaaaaggaaaaaaaatcgttctcaaattcatcaatagtttgaaatagggtgtgccttgattcagaaagtttcgattctagatacaactcggagaactaggcgtgtcttgtacacagatttgctcttgggggaccggaaaagctaaatgctatcgccatgctatgctccttcttctaggccagtgaggggaacgcattcttcattttaatatttcagttgcctacaatattggaaggtggataaaagcaccctctgctccttctaaatctgcgaagacatttcttctctgcacctactcatccttgatgcagctctcctcatgtctgtatggaaacactgtgctctcaaatgagtttcagaaagaacaactcacgaaagaaaacaagcattcggtcagaaaaatctccacaaatggggrataagggggatttgctccaaggagagactggaaaccaagtcagacataaaatccagcctaagctagaaggagacatggctggtgggagcttgaggaaaacagagctcaggatggaggacgtctccacctccagtcatgtcctctgtccaccagacaccaagaagtgttcatgttccatcgaggcagccctcacacccatcccttcctcatcatgccgactgcctctttactgcttcaggctcaccatctcaagtcgacgagcctgtaatactggctttcttgatcaccctgataccagccgtcacctcttgacaggcttattttctttaagctgtcattacaccatttttctgctcccaaactattaattccaaacttccaattttctgttaaattaaatatgaattccttatttgactttccatgccctattaggctatcttgctccttgctttacttatagaaactaatctcccattatttatccaaagacaacctctgctgcaggccagtcagcttttcttactgtcctgtaaaaattccatggtcactcctccatttccatgtgtccttaaaaactgttatttgattgtgtctcagaaagtcgtcaaagaatatataccaatgaaaagcatcaaaaaggttatacttgatgttatgtgtgtatcaaaaatatggctgaaatatttatccagtgaaactcaatcaacactaaaaagtggttctttcggaagcatcagttctttgagacccattaaacagatgcctcggatgcagggttatatattatcaggaatctgtctagggaagaattattggaagcttgcaaagcctttcaaggacagaggacgatagctaccacgttgagttctaggaaattaaccattgttattgttaaaggaagacagcgtttctcagaggaagactgttaamcagtgcagtggcccaggctaacagccctcataagtgggagtatcagaatgagtggacttaattacttaaaaccaatacagggtggaacttcatctgctataacagaaatcaactcgtgcaagttctaacatgcagggtacagttctgagaccaagtctgactcacctgtcaaagctcagctcaactattaccacctttacaccacccttccaagctgtaggagtgcttgctgttctccatgtcttctgaagccctggatcacttgtagccagctcagcagactctacccagacagggatcctttaaatgtaccatattgtctactgtgttaaaaatgagaggaactgactcagggtgagagcgatggagtgtccagatgttctcctttatttctccttattcctggaaatgtawtgagaatcttagaggtgaactgaaaagttatgagttcaaccacttactcaattcgagattcgctcctaaaatgtctcttctgtgttatcacccccactttggtttgaatagtacttgtgacagggagcttatcacctcacaagaaaatccagtcattgcttgtagctctctattaaaagttttccatcatctggaactgaaatctggctccctgtaacttttagttattggaactacttgcccttcagcaacagtgtatgtatcctcccatggaagggcccttacatatttgcagacacccagcatatacttgcaatcttttcttcttyaggttcattaccctagtccttttagttgttcttcatttgacataatttcattattcactagtgaaccttgctgcccttccccttgataaaccgaatttgtcagtgtcattcaagtataactgacctcacagaacgtgataccacaagcgatgtggtctgattagcacagagttcagtgaatgaatcctacactaggattggatgaaatttacttagccataccacactaacacttatgtgatttttatgtttactatggatagactatttctcctgtgtccacttcttcctcttacacagttgttatttcaaaactgaagtacagattcttacacttaccctcaggagattcatcatgttagtattagtctctcttttcaggctttatgaatgttaattcagctaactcatttttgagctatctgtctcattttgtgccatctgcacagcataagtttgatttctgttgcttttattagtagttttactaaatacataaaagtgaaatagtgaaacacagagtcttgtagcatccactgtgggatcagtcttttagacaagaatgatgcagttgctgagtcaaatgaataaatgaataaatcaaacaatactttgtcctcatttcccatattgatctatcaccatatcctgttaattataattctaaatatttcttgatctatccacttttcccttacttcacctgctactatcccagaccaaacagccatcttctttcactcaaacaattgcagtagccaactgattggtcttcctgcatctgtcctggcttccctatcatccatttgctacacagaaaccatggtcatcttttcaaaatgcaaatctgatgatatcagtctcagctctaatttctttggtggttcacatataaagactgaaatctttaactgaccaataacacacgtgtgatctggcccctgctcacctcttcagccttgtctttcacctgtctcttcattttggccacagggacctcctcgtaccttctctcacgtgccctcctgcctcagcgcctttgcatatgctgttccctttgccgagaactcttcctgtcaactcccaagcccttcacctacttagcacctacctattcaatctgttctgtttgcctcttggtatgttacaaactgtctccaaacttagcagcttagaacaatgaatcctttaccctctctcacaatgtttggggtcaggaatttgagcgggccttggctgatttttctgttcctcatgccatcaattgatatcacctgatgttattaagctgatggatgggctgatctggagatgcactgtccagtttggtagccactggttacctgaaatgcagccagtcctaattgagatgtgctataactataaaacacccacatgattattgaagatttggtgccaccaaaaaatttaaaatattcgttaataatttgtattctgattacatgttgagattataatatttcacatacatcagataacataaaatgtcattaaaattaatgtcacctatttctttttaatttctttaatgtgactactacaagttttcaaattatatctgtggcttgtaattgtggcttgtattgtattctttttttctgagatggagtcttactctgttgcccaggctggagtgcagtggcgagatctctgctcatcgcaagctctgcctcccaggttcaagtgattctcctgcctcagcctcctgagtagctgaaattacaggtgcccgccactatgcccagctaatttttgtatttttagtagagacggggtttccccataatggccaggctggtctcaaactcctgacctcaggtaatctgcccacctcggcctcccaaagtgctgggattacaagcatgagccaccacacctggcctgttttatattcttmytggacagtgctgatctagagcaggagtcaagcagttttttctatgaaaggccacatagaaaatgttttcagctttgcaggccatgcagtctccatcatagctgttcaactcttccattgcactgcaaaagcagccatagataataatttacaatagacatagcagtgttccagtacaactattaataaaaataggtggtagccagatttggcctacaggctgtagtttgctgacccctgatctagaagatccaagattttattcatatgtctggtggcttggcagggataggtggaaggctcagctgggaccattgacccaaacagctatacagtcctctccagcatgatggtctcggggtagtgggacatcttacgtggtggctcagaactccagataaggtactcccagagagacaggtagaagctgtgaggcttcttatgaccaagctctcgaagtcccagaatatcccttgtactgtattctatggtcaaacaggtcactcaggctagcccagattcaaagagaggagatccaactctacctcttcatgggaggaggagtagccaaggatatgtgtttctttttaatctattatatcattcttcagatctcagtttaggctggtcctgttatgggctctcaaagtaccatgaacctctcttttgtagcacttgtcatagctagttttacatttctctgtatgattacttgatcactatcttgcttttctactaaactgtaggcaaccacgtgaagaggaactgtttctggttttgctcattatattcctagcaccaaacacaatgcttggttcaataaatatttgtggaagaaacgaatgaatgaatgaaccaatagcaaatgaatgaatgagtaataactgtatcaatattaatcctacatttctccatattgctgtcacgtatatcataagatactctgtcagaagccttgctaaaattcaaatatatttgattcccagtaaccttcttattttgtagttcagaaactttataaagaaggaaataagcctatcttactcttcccagtatctcaaagagggtttctgccctgagctgctcaagagggtttctgccctgagctgctgttcattctgcaaacactgctcgaatacccactgtgtgccaggtacagagagttcttctctgctgtaatctggacaggcaccagcttcccagcgtgggtttaggcttcaggtgcacactactgtgtaccgtctaagccacacctagaagagctctggggaaatatgactacttgggcagaaaaggaaggaactaagaagaggtatctttgtgtctgaggtctgaaggagcgtgtgggctcttgttcaggcaaagggcaggatgaggggaggtggggtggcagcagccagtaatggggtgggacagcggaatgcagaggatgaaacttcaggtcctggtgctctgagaagtaacgctgtgcagcatgtcacacccagaggcaaaccaaggccccagggagctgatgttgcactggagctctactctcctctcagcgagctggtgacgtgccagtccagcaggcctggcttatccaaccacaagtatgaatcggcagaaggcaatgagctgggccctgagtgctgctgggctgaggccgacctaatccttcctccacagagactgtggtgtcccctgctttgctcagggtaagaactcttgtatacctcacaagaagccaaggactacctaccaccttccacactggccctggagcctgcattgtagttatttgtggacactttttcttctctttagtgccaggtgggggaccaaggcctacatgtctttacaacccctcaatctctagaacaagtctgacactgagtagatgtagcaaatgtttgcctgaaagactacctcaataaataaccttctgaggcaccagcaaacttctcagcatttttcctgatactccggttaccactaacattctacacaaagttgtgaaataagtctttttctttgttgctctccaacatctactgtggacccctcctctcacttcctgtttcatcctctctgcactcccctgtcccaccccattactggctgctgccattccacctccctcatcctgccctttgcctgaatgagagcccacatgctccttcagacctcagatacaaagataccccttcttagttccttccttttctgcccaagtagtcatatttccccagagctcttctagatatggcttagatggtccacagtagtgtgcacctgaagcctaaatccacgctgggaagctggtgcctgtccaggttaaagtggagaagtactctctgtacctggcacacagtgggtattcgagcagtgtttgcagaatgaacagcagctcagggcagaaaccctcttgatgcaaagggatactttggggccccttcttctcccaccccagtctgtctctctgagagtcctctcgattccaggagccaccatcacacctggccctaggctgtgctgctcccgtctgtctcagaggctagataacatcagagtcctttccactggctcctgtggcagagcaaaaactggttggcatttttaaacgtgctacaccagtgtgaaagaaacacaggctgcatgggtttaaatctcagctgtaccatttactagctgggcagcctagggcaagtactgtgacctctctgagactccattccttcatctgtaacatggggacaaataatctcaccctgttgtgagcagtaatartatgattaatcatttagccaactcttattcatgttctctgatgggccagacatacaaagtaagtgaaagtggattacggcaggtgctcttcttggtttctggagtgaacctccatttacatggaggctcctctttttagatttctgactagttcacccaccttattcatagaccttattctgtgcttagctgacagaaatctcctctcagagaatccccccggtaaattcttaggttctttcctcttccattcccctttttgctctctccctccgaaggcaagagtttccactttacaggcccactggagaaagttatggcttctggttgtggttggaggttcattcctgagggagtggggacatttctacacttcttcacggccaatgacattggagaaactggcttcctaacccagcccacaccctcgcacacacacatcacacatcatggctagaatggagagaaattcttcatatggggcacttgtacttcatgaaagaaaatcatatcaatcttgagtattttaacatcctattacagcagggtcactgataaactaagtgtccagagtgttttctaggatggtgtgtggtctccaaattaacattagtgaagcttactggaaggattgttactcctgggccaggccaggattttgaggagagatgtgtttgctgtcaccaaatccttgacagactttggcagaagtgtgttaggcttactctggatagcttcagaggacaaaactagtattgacggaaggaaggtaaggagaagcagcttctaacccaggggaagagagagtttccaaactgagaaatcaaaaatggtactgattccttgtcagggtcagtgcttctccccactgtgtgaattacaggggccatttgtccargattcctyagagcaatactgatttcatgtaattatttgaatgaaaggtgatttgttaaatttatagtaaaatataatttgatttgtgtccctgtttgtcatgccaccccagaagaaaaattgtctttggttaggtcgaacataatggttttttggtttgcaaaccatgagcgattcccatattaggtgggagttcagattcaaagggccctcttttttttttttttttttttgtagtagccagcctaatgagtaggaagttgttctcactgtcattttatattgaatttcttttattttgagtatgaccatcttttcaaatgtatgagatagttatttccagttccacatactatctgtacatttcttttgcccgcttttagtttgggtctttggcctttttcttattgatttatagaagctcttttatacatagaaaattaatactttgtgactagttgcaaatattttcagttgctgaaatacacagtaggtgttccatgtaagagctgaacagctggttcctgattgctgtctcccycccttccagccaatagatttcagagtttgggcattacctattgagccaaagctgacaccacacaagcgcagagtatgggaacagagttctctgtctgattcctgtgagcttcctcatactaaatcaccaacagcaacctacttatcacagaatatgagaattgaacaagtgttggcaaggatgtggagaaattggagctcttgttccagttgtcgatgggaatgtaaagtgatgtcgctgctatggaaaatagtgtagcagttcctcagaaaattaaaaatagaatgaccacatgatctagcaattccccttctgggtatatacccaaaagaactgaaagcagagtcttaaagagatattcatacagccttgttcataccagcattatgcacaatagccaaaaggtggaagcaactcaaatgtccatcaaaaatgaatggataaacaaaatgtagtatgtacatacagtggaatatcatttagtcttagaaagaaaggaaattcaaacacatgctacaatgtggatggcccttgaatacattatactaagtgaaataagccagtcacaaaaagacaaatactgtatgagtttacttataccctaagcagtcaaattcatggaaacagaaggtggaatggtggttggcaagagctgagaggaggagagaaagaagagttattgtttaataggtatagaggcttagttttgcaagatgaaagagttctgaagatggatgtagtgatgactgtacaacaatgtgaatgtatttcataccactgtacactcaaaaggtgaagatggcaaattttatgtgtattatgccacaactaataaagatttctaaaacttatgagatctaatttcaccgtttcctattgctaaagatcacaaattagaaaacacgttggcaaaaggtacatgaaaataagcactcttgtgttgatcagagcataaacgtataatctcataaactaataaagatttctaaataacaaagatttctaaaacttatgagatgtaatttcaccatttcctattgctaaagatcacaaattagaaaacatgttggcaaaaggtacatgaaaataagcactcttgtgttgatcagagcataaacgtataatctcaggggagaacaatttgcaactattcttcaaccctttggtcaaacgattctgcttctaggaatatagcttactcccacctgtgtgatatggcatataatcaaggttttccattgcaacaaaagattggaaacaacgttaagtatccatcactagtggtctggaaatatatatatattattgtcatccaatagaatacaatagactaatatgcaacttttagcatgaggatactcgttacatgctgatacagaataatctccaaggtagtcatatgtgtgcaaaaccgtacatagtatgctaccatttgtrcttaaaaataaaaagaaaacagaatatgggtcaatgtttttgtttagttttgtctaaagtaactttaagtagaggcaagaaactggtaacatgtaacagtgatcacccctgttacctctgtggaagaaaactagacagctaagggacaaggctgggaggcagacttgctttccactatttatcacctttatctttcaaatttagtaccatctacatttagtaccatgatctattcaaaaatatttattaaaaaaagaaaaggtatagtctagaaggaaaaaaaacataacagacacttctagcccaatgtcctgcactgggtgctatgagagcagaggaaagaaacacatatggcttctagacaacaccgtctggggcatacatttctgctattcgatcaagaatagttgtgcatcttttcctggaaagaattgatttgtttttatcaacagacctatgaatttagtggacagacctgtgaattaattcactggttaggttttcctttttacattggctgttaaaaagctataagccaaatttatgtccccctcagtgcaaattgggcagatttctagggcaagcatttagcactggccttgtccttggctctgtatcatattcctgtatttggtttgcttttccacctgtttctcatgttggtcatctttcctgtgtatggccataccatcctgaatgtgcctgatcgcatctaatgttggtcacctctccttattctttgcttccttataagccactaagcagcctttttggtgctagttagggtaagtgcgtgggtagtgaaggagggaggagggagaggaagaaagaagatagaggttataaagcaaagcatatcctttttcttggcttcatcatgtagattaagtgaattgctctcaaagcgtggtccttaggccggcagcattgtcatcaccttatgttgttaaacataaaaattcatgggtttcatcccaacttactaagccagactttctgtggttgaggcccaggaaactctccaggtgatttttactcacattcaagtttgagaaccacaggaaaacaaaaggaaggcagatttctaagcgtaaatgcaatactaaccgattgcccccatcatgcctgttatgttggtcaagataaataatactagctactgcaataatcaatccctcaaattttattttttgccaatatcacaatccattgtagatcagttgtgggagaggtgtaaagagagctgctttattagtttattaagcaaaccagatmtcttccattgtgagactttgcgattttctaggcccttggacatttcctctggatcccctgctgctaagaaggcaggagagggaggaaagagaagagactttagcagccagatctggaagaaacatcttttctgcccacaattccattggctagaagccagtctcatggcctgtataactgcaggggaggctgggaaatgtgacctatcgatggagctaagagcaaaaggaaatggctttgatgaagccctggcattgtctctgcacacccgagaacccaagtgaatcccaaactccacgtccaggtcatgttttggtgaacatcggttttcagtttccttttctaatcaagttttaccttttttttctcgactctagcactatgggactgagtaacattctctttgtgatggccttcctgctctctggtaagaacctttcagctttgttaagtcctggaatcctactgtctcctgatgagtctgaccacagcaagcccaggcctgagacttggtgggttttactcactttctactgagcattgtacaagaccacatgcaaaaaagactttcctggagaagaaggaagtgttatgattgagagcagctgatggcaggcagctgggatggagctctcccccccgtgtgcttcttcctcctctgcagtctcacatcagtgagcctagatgctcagagtagggtagcctggcccatcccatggggatgggggaaggctgctgcactgaggcccctgagacttgactcttttgttccacacatattctcttctggtcttctctgaccctgtttctgtctttctcaggctcctaggaaacaactgacagaattccaaaagtctcccttcattcggagcactggctttcacgtccctgacttccctaccctctctcactcccttccctacagcccatgcacatacctcatggttgccacggcttcctgacaactatggatgttcagctaattgtgtcagctgatttatagtggagccaatgaagctgaagcttcagagccctccatttgcacaaccctttctaaatccccctcaagaccctgtgaagggccccctagcagtgtggtcacctgtcttatgctttggtaaaatttgaataagtaagatattgtaaccacaataagttatgaccactgtctccttcctctgcaacttttccctccatgccattctcctgtctggtggtgttagcagtcaggggcattttgtatttgaattctacattctttttcttaactatccaccacctcccctcaaaattttaacagcatccagcctcacaaaactcagatcttccctgtttacagttccactttgagtttcagtttcttcatctataaacaggagttggctgcggtccctgccatgtatcctgtgactcagtgtctcgtagttactcctggcccaccccttcctgctgctccttgtctccacctgcaggcctgagagggaagccaccccactaagacagggaggtgaactragcctgaagtttggctacagcacccacaggccaccagccatgagttcacctcctccagatggccacacaccaggcccttggccactgtccccatgtctgctgtggatgatgaggagtcagggaactacaaagagatggtccctcagatccatgctggctgggataagccttttcagatttctgtttttctgcttagcaccttgagcttgtggagtccttgagtgcaaggtctgtagatgtgccagctgatcactgacttaggtaacaacagcagcttccaacccccagggcccatgacctgctaccttagctcctggggatgtgggaggtatgtgtgtgtcagagagcaaggcaagaagactctagagaacattatccagtaagattcccttctcatcccacttcttatttatttattttatttattttattttttgagacagcatctttctctgtcacccaggctggagtacagtggcacagtcacagctcactgtggcctcgattacctgggctcaagcaattctcccacctcagcctccccaagtgctagaattatatgcatgagccatcgcacatgacttattttatttatttgataaatgcatatatacacacagtcatgaatcgtttaacaacaggggtacgttctgagaaacacattattaggcgattttgtcattgtataatcatcatagggtgtccttacacaaaactagatagcatagcctgctccatacttaggctacctggcacagcctattgctcctaggctacaagcctgcacagcatgttactgtgctgaatactgtaggtgttgtaacacaatggtatgtatttttgtatctgaacatatctaagcatagaaaagatacagtaaaaatatggtgttataatcttatgggaccaccattgtatatgactgaaatgtggctgtgcaatacatgacagtatatgcatatatatatatatcccttactttgtgcctggtactgttctaagtacctcataaatattaactcatttgagcctcacaataactytctgctttaggtcttgttgttatttcccattttaagatgtggacactaaagcccagagagrtgaagtaatttacccaagatcgacagagctactaagtggcagagcttggattcacacccagcaatgtagatttagcattcgttcacttgactcttctcctaactcttgtggtaaaccatgaataagtggtaagacttcttccatggggcctgaacagctttggtggataawatagcttctgcctcatccgtgttcatccagtgcctcctccccatcacctgcagctgacacctcagttgacccaagagcttgggcccaagcccttctcatcaaagtgaccagcccagctctcaagatctgggagagaaggaagaaaaatgccctggaaacacatttccagaaaacactaaactggaacaccatttcccaccaaattttctgactccgcacactgaaagtgagaaagtaaagccgagacactctatgaaaactgagttcaggtgtcacttttgcccttgatttgccattgacacttcttagaagtttcttagctcctgagaaaagagttaccaatattgaaagcaacaacctcaaatggtaaccgtttaagttttatggtggtgagagaataagtgactatatttttggcagtacaattttaaagtggaatagaaagcccatgacatcagatcagaaaataacattgccagtaattcacacacgatgaaaagcaacaaaaaatcagattctatttgaattctttcttctcagggcacacctctgcttactgggctggtgaacagtgacctagccacagggccggcttccaaagggagaaaggagatgcaattggcccacataatccaccctcaaaatgtagagctgaataattcatttcatggcatagaaatagcaatacagtgaagcaattctgtttaacttttccctcccttatattttgtgtcctctgtcatggaaatttgacacagtagtatttgctgcccctgctcttgaggataaaattggatgggagtttaagactgaaacgggcacctgtggccttgcagaattaggttacagtttgtgccttgtatttacaaagcgaaaggaattcctagtgccacctgcagaggcacttctaactttcaagctctgtttgccactgtcctggcacctccatcacacttttaggctggagccagagaggtttttgaaaaatcagtagctcccacatcaggaggaagtatctttccagtttgagttttggtagctgctctctttttgtctgagggttctctgggtcctagggctttctcatttctcttgaacaacacctctagttaatttcatgtacctggagtggtagttggaatatttcttcactttaagatttttttttttttttttgagatggagtctcactctgttgcccaggctaaagtgcaatggcatgatcttggctcacggcaacccccgcctcccaggttcaagtgattctcttgcctcagcctcccaagtagctgggattacacctaccaccacaaaatacaaaaatacacaaataatttttgtatttttggtagagacggggtttcaccatgttggccatgctagtctcgaactcctgacctcaggtgatctgcccgcctcgacctcccaaagtgctgggattacagacaggcatgagccactgcgcccggcccaccttaagatttatgtaagattggctcaaaagctcattcctgtggaaaggtccactgttttcctcccaagatttttgcagatatctgcgtgggtggttacttttgactcccatttcctgctgttgttgatagccctcattaaaaccatcacctggaggtgaatagacagtcgagacctrtcattcccaaagaattgtcatggagcctaatagttctattggattcacccctttatgttaagccaccatttcagtgtttttcaaaatagatatatgttatctagtagggagtatcttacccccaaattagttgattgtttcaggagggcttttagtgggttccagagaaaatgagcaatcagacaagttgatttagtggaagacagtcactgaataggatgtgtatagggttgtttgggagcaagagtgaaattggtatggaacagagaggctcccaaggcaagcagacattttttttggaagaagcaagtgtttgagagactgtggcttatttttcctttgtgagaggggagttttaataccatttccaaaatatgtaacctggtattttgtccccagaagtactgttgagatttatggaagcaaaaaactctgtcacccaggctagaggagtgcagtggtgctatcaaagcttactgcagcctctaattcccaggctcaagagatgtttctgcctcagccacctgaatagctggcactataagtacatgccaccatgcctggctagttttttttgttgttgttttgttttgctttagagacggggtctcgctttgtgcccaggctggtcttgaactccttttaagtgattatctcttctcagcttcttaaagtcctgggattataggcatggcctatctatttttatgttttataatttcttgtactttttgatgttacttcaaatatctttttaagtatcctaaatatacttatttaaattttttttgagtaaatttatctataaattattgattttatgtcgatagacattgttctctatcattaataatgttaaaaataaataaaaaaacaaaaacaagtaaatcaattaatgcttaccacaggccagtatttgatccaacactaactcaaatattcatttcttyaatcctcacaacaaacctatgaggtaggtaccattattgttcctgctttttgcaagaggaaactgagacacagggaagttaagtaatttgcctatggtaacacaggcagtgagtagttgagctgagattgaactcacgctgtccagaatccatrctrttagttataatagtgtactgccctatagctttctgtttcacagctacatggcattactttgtatggatgtatcattatttgttaaaccatttaacttatttccagtgtattgttcttataaacaatgaatacctgtgtacctctaattttgtgcacatgtatctttttgtagaatgaattcttaagaaattgagttgctaagtcaatgcttaagcccataattaattttcttacatattaccaactgtcctccaaaaaggttgtaccaatttagaattttaccagcagtaaattcagcagttaggacccattttcctaacactctcgcggacactgggtattaccagtattttttttaatacgtgccaatcaaatgggcaaaaagaatggtttctcactgaggtttaaattgcatttccctagttattcttgagatttttcctttcctttcttcaacaattacttattgagtgcttcatatttgtaagggacaattgcaggtactggaaatgtcacagtgaggaaaagtgacaaagcccctgctgtcatggagcttattctaatgggagatgtcaggtgctcagctgagctgggagagagagagctgagttgtcaggtgtcagaggagccaattatagcagcaaaacaaaaataaaatagttcagcttttaatctcttactacgacggtataatcaagaggctaaaatgggaggaagggcagactctgcctgttccatttccccacatagagtgagtataccagtcgagggtcaggtaatcagtgcagacttagggggtcgccttaccattgaagaagccccaaatgaaaggctctagcagttttatggacctgggggtggaggaatccaagggtggggagaattcatgaggaaaatgaggtgagagggctaggagtggaaaagtacaaagtactgagttagygtggggaatagtgtctttagggctaggagtggaaaaaatactaggtactgagtcagagtggaaaacagtgtcttcaaggcagggagtggaaaagtgctaggtactgagtccgagtggagaaaagtgtcttctctatgatgaggaggcttcagcagaggtgcctgaagacctcaccccagagcctcagataaagagacctaagaatgagggtgcctgggctaagattgcaagtatgtgaaaaagcatgactggcgggaggctgagatcttgattgcagcccccttcagagactgccatgcactgactgtgcaccaagtctgctgtagaaagggcaacttcctcagcaaggcttgtcagattaagcctctttaattgcctgtggtcaggtctgaaaaatcacacatagatttttaatcagaacccagacatctcaggagagacagacaataaccaaacataccgtgtcatgtcatgtcatgataagtaccacaataaatataagtcagcatgagggacagaatgcccaggatgctatcttcaatagaatggttagagaaatctccctgggaggtagcatttaatgaaagacctacatgaagtgaaggagaagctatgagactgtctggaggaagaaccttctggacagagggaacaacatgagaagaggacttgagacagagtgtgtgatcttttggaggaatgtcaagggaggcagtgtggctggggagagtaagcaggggaaagaggcctgataggtactggggacccaattacatgaggtcttgtaaggccaggggaaggactttggatgtagttctcagtgtgaggggaagggatctggatatatttttcagtttggtggaaggcatcagaggcttctgaacaggaggattatgtgattggagctgtatttttaagggatcattttggcttgagaaactagacccggggacaaggacggagcaggcagatgagttaggagacaattacattagtctcctctacccttttcttaacatattggagttcagctctggctgtagtagttctaratctcctcagacacacttgtgtagagcctctgttgggtattttgggtacacaaatgattcatcttggttatacagatgatttagatgattgtagacagaagagggttgtctggtcattcccagacaggggagcattccttgagatagagtagaggaaggctgaaggggaggaagacagtacctgttgctatctagatagagacatccagcaggaagttgaatacaggtatctgaaactctagtgaaagttataggctggcaataagcacctgggagttattagcttttacttgacagttgaatccgtggggctagaggagaaaaaccaggaaagtatggagaataagaagaccaagaacatgcactcaaggttaccaaaattaaagagtgatttgagaaaattaacaaggaaatcagagattgggaaagaatagagcatttcaatgaggagagatgccaacacttgcatttgacacagcggtcaaatgagttgagatctgaaaagagctcaagccttggccatggtgtgaagtcaccaacaacctttgtcagggagtttcagtagagaggtgggggtgggaggctgggaataaaggcagcaattgctgcttactctttcagggagtttgactccaagggaaagagaaactaaaagcagtagcacaaggtttgtgtttgaagtaatggaggtgaaccaggtgaatagcctggaggccgagtgaagtgagacaggacactgcagatttggaatgtcaccagtccgcacaactgaataatttcctccagaactgctcaattgcccagttgtaagaacagatatgtagaccaaaagtagagtgtccccagggtaaattttatagagacaaaggggtgtgtttattgaagttgtggaaaggaataattacaaagacatactattgttgcattgtccaatataataaccactagccatatgtgactacttaaatttcaattaattaaaattaaataagattaaaaattcatcttctcagtcatactagctatgtatcaattgctcaatagccacaggggctggtggctatcatattgttcagcacagagacagagcatttccattatcactaagagttcttgtggaaaacactgcactacagggtctggataaagctgaggtcttgattaagttgaacaacagttgtagaaggagtaagcaagagcaaaacctggatgaataggaggttgtggacggagattagtatattgagattaagattctagggactgagctgctccaggtgaaaagtttcagggttatgtcataagaaggtggggggcagctgctgaaatagtctgcgggtgtagacctgtggagttgacaagatcaaagaaatttgaggcaaggttgttagactcattcatgaagaagtcacccaaattgttagcaagaccttgcatctaatgccaaaatcctcatttagcaaggtggtagtgacttagtagctacaagcaatgagaaagtcagacacctcaaaaggggaaggtgttgctcaaagtccccacaaagtgtgataaaacaaacagtagctggggctggagcaagtggcttcctttgggtgaagccagatttcactgaaataataacctcagggaaacagtcaatgaaggggttaaagatgtgggagagtttccttgtagtaagtaatggaatgaggctttcaaagggccaagtaaaactttggaggaagtttagtaaaagaaggaattttttttagtacagataagcataggaacataaagaagagataattcttaaacatataagatatgcatttggggatagcagccagggaacactgaagtcccagtggggtcagagacttcataaggctagcaaattacagtttttgagtggcattccaacagtagagtgtattgctcaggaagtccttaattatcctttgaaacaaattccttcagctgattacgaaggmatctagctggattcttgagcgacttgttcctgacatcatagcaacccattgtaactagacttcgaccattcctcttacccaagtgctggggaagggagagattctcaatgcttacccacctrtggaatcccagtaagtccagttgctaggtggcttgaggtctggggtcataaaatggaaggcctgaagtcatttggtgatcacagaccttgagccaaactttccccatttagtcagagaaaggattagcagcatcccccatgcctggctctgtgtgagatcatggaagccagtggttggtgaggtgctatggagtataaattgcaaaatactttcagttccactcagaatggatttcaaagtgatttccaccccatggggaggagagggagtctgaggagggatggatggaaaaaaaattttcatgtcattttctgtgatccactctggagacagaggcagagattctctacaacagctgctcaaactatagctcttgttaaaatggaggttctgaatcagtaagtcttgggtggggccagagattccgtgtttcagaccagcccacatgtgacgtgaatctcattggtccatacatcacactttcagttgctaggtgaagaagggagcactcgatgagtggaagagaaagccgttgtaatctttgggagaaggggcctgggtcagcggagttagactggtctgtgagtggacagaatggatgggaaggaaagaagatactgtgaggctctacagaaaaaaaaaaaaaaaaawawatatatatatatatatatatatatgtaaatcaagaagacagaagcagctaaagacgaagtcatttccaggtccagaaggcacaactgacagctgagtaataacataacattgactgttaattggcagaatttttaactgtgtgtttggtttctccatcaggtcatctgtcctatattacatgacaatttagactaaaaccagtatttcctcagagacaatgctagaagcttttacagtagggggcactcttgcattacattaagagctcagcaaagaagatgcaraagcctcaggtttgccttgtaaggtgattcataaacacactaaatcttccttaggtctccctttcactgtcagggtacgcatatagattttccttcctccctccaataccggtacgcatcctctacaggtggtgcattttatacctcaagtacttcacagggtcctagtgagtgtagtgaaataggcagtgattcatatttgtgcaaactcccactgatgcctgctgtctgcttccctaagagttcaagaccaccaccaaccccttgattatgtgttctcactgggccactctgtacacagtttagtttgacaagtgcatgtcactgttatctgtccttctattccctctttcaagagaaaccacatcaatttaattactcccccacttagaactcttcaaatgaagctcctctcatctctctcatcaacccatctcctccctttcctcctcaatgtcaacatgccttcacataaatcctgaatgatgaaattktatttagaacttacactaacttcctctccaaggtggcatctaacttcatattaagtaagaaacagccttcccactctccacccccgcacttctcacccaccactgcttactttttttttttttttttttttttttttgccaagtctcaagtaattctgtaacctagaaaaggtcctacacaaaccccgtgatcattcacatttaagtagttgggtggcccacatccttcccacaaaccccaaagtgtcctcaaggactaaagcctttctctcaacccttccagcatgatgtctatggttgtaaaattgtccagggtcagtgcatactgggagcagcaagtttgtggtgcctggggtttccccaatactcccaaagcacatcctcacctgcccatctatgattcattttcagcatttcactcatgtgccttaaatggtcattgaccaccacaatccgaaaacagccatcaaatttgcccagttctctttctgatctctgaaagagcttagagaggtcactgaaaataaaggccttggttcactatcgaagtcatttctaaagcatttgacatccttggaagtgctggccatgggagcagcagtcataggggaagttctgtaaagggagctatttgaatttcaaagatgttactcaacgtgattccccaactaatgaagtataataaaggggggctataatttattaccattatcagcaatcttttcaccatagcagaccaaggaatatgtggatgggaggggaggggaaagcttttggtgatggtgtagaagttatggaacctgtaacagctacagtgatgaaaactaaaattaaggttataggaaggtaactggtgggtgaatgggttgtctaactctactggtttttccctgtcttgcaatttaaattcacagaaccacagtactagaaagacccttggaacatttagtcaaccacttcattaatcagatgaggaaactgaggctcataaagaytgcagtttgtacaaggccacacatttagtcagcggtgaagcaaggacaaaggtcctaatctccagatgccaagcagatgtgcacagttccagagcttaatatcttattcttcagcatgattactgataagatagtatctgggtattgtataaagagaaatggaggttttttcccctttcctcttgtttctccctccctaatccttaaccttcttttttaggtgctgctcctctgaagattcaagcttatttcaatgagactgcagacctgccatgccaatttgcaaactctcaaaaccaaagcctgagtgagctagtagtattttggcaggaccaggaaaacttggttctgaatgaggtatacttaggcaaagagaaatttgacagtgttcattccaagtatrtgggccgcacaagttttgattcggacagttggaccctgagacttcacaatcttcagatcaaggacaagggcttgtatcaatgtatcatccatcacaaaaagcccacaggaatgattcgcatccaccagatgaattctgaactgtcagtgcttggtatgtggtcaatggtgtgtgttcagattcttagccttctcagatgagactgcaaatgagttagaaaaacactggagggggacttgaggggcccaggggaaaaggggggtctatagagagaaggcagaggacagccacttctgggaagtgcatttgaagggagtgtagagtctgggagtagggaactgaaagtcttttgtactttttatagtctgcttctgaaggatcagtaaaaatctgctttggggaaaaaatagagctaattgaacaaagataatatggctaattacctatagtaaaaaccatggataatttggccatcacaaagtttatataaccataaaggcctcagatgtcttacattcattttttccttgggtccaagatttttcacctactaaatctttgcctggagctcctagcaaagcggacagctgacacatttgggttttcccttcagcctcctctaggttgcttatgagttgtttgctgccacaaccatgagcctggtagacagaagggaaaaaaacccaacaaacataacccacaaacttacaaaccagctcctctgcttcacgagaccttggaaggcctaaatgccactacagatttttttaaaactatcacacagtaaaattatttttttttgttttgatatactgttctactgattgtatagawcttgtatagatttaggtaaccgccacaggacatagagcatttctatcaccctaaaaatttccctcaggctgtcccttcatagagtcataccctgtctgcactcataacccttgttgggcatcctatagttttgtctttttgacagtgtcacataagtgaagccacacagtatgtaaccttttaagcctggcttctttcgtttagcgcgccttcgagattcacccaagttgttgcacatatcgagcttgtccctttttattgctgagtagcattttattgtttatccattcaactcagtaaaagacattgggttgtttctggtttggggctcttatgaataaggctgctgtaaacgttcatgtacaggtttttgtgtgaacataagttctcagttctctagaggaaatacccaggtgtggtattactggatccaggttaatttttgatgaaacttgaaaaggcagatcaacacctattctaaaaccatagagtaaaacagaagcaaaagtaaaaatagaatggagagctgctccctttgaaccctgtgtgatttaaactaggctgcagggctttaggaatagttaaccaagtgctaaatccgtgttttcaaaatgtggtcaggtaccattggaaatgttttaggtgggacacagataagcattttgaaaagccatgttgtatttgttttaatgtatattagaaaaactctaacttacgcaacatgtgatttcacagatcttgttaatgaagctaaacacggtctggcaattcaccttctacakgccacatagastccaagaagastgctcaaatagtacactgatatagcaaaacttataaagatgacatgcaaatgacagaccttttagtaagaatacactaaaytataaattagtttgtagaacctgcaaactacctagtaactataaaagaacaagggattttttctgacagaaggcacatgacacaggtctagggactccatgccagtgatcctgaacagccagaaaagtgagaatggcaaaggcaagagaaacactgtgtttattaagatcatgtatttttccctaaaatagctggatttggccttcttcttagagtatgttatgaagacactttgatgctcatgccaaaaatcagtgttctgaatttcgaattccaaaatatccacccactcacttaccacaatcctgcttgggtttctgaaagatatgacgcagggcatctcagcaccatgaactctgtcagttcctggtgagactccagctcaattccttcctgctctcttagtctggggagctggaatgtgccccatgggacacctgggccctagagtcagaccacttctccttccaaagactctactccctggaaacagtggcttcattgtaaatctttggtgactcaattacagccctcctgtcacttagagagcacccctttgatttggataagcaggaagtaagcatggctgcaaactctattgttgaaaaataaacatgaagtcattatgtggcactcaccttgggctgagggtcacattttagacaccctgaggctcccaggtgtgccccaatgagccccagatcaagtacccagttatttgctattccctcctagatacatctaaacttagattgatttttttttatctctcttctgctttcagctaacttcagtcaacctgaaatagtaccaatttctaatataacagaaaatgtgtacataaatttgacctgctcatctatacacggttacccagaacctaagaagatgagtgttttgctaagaaccaagaattcaactatcgagtatgatggtrttatgcagaaatctcaagataatgtcacagaactgtacgacgtttccatcagcttgtctgtttcattccctgatgttacgagcaatatgaccatcttctgtattctggaaactgacaagacgcggcttttatcttcacctttctctataggtaaagctgttttccaagactatttctttcagcaggtattatacacaaatgcttaaggcagatcatccaatgtccccgacttgctaggaaacctccaactgggccattttatgacgctgttaggaaggacccagatggaggtctcctgcttctcctgagtgatgcagggtccaggaggctacgagcctatgttgcacttgaagaaatatgcttttagccctgaaactgactcagtctcttggtttacctttggatggaggattctgaagttttgatttaaaaatacaggattcctccaggctagaattctttctttgattacaacacatacatgcgcttgmacacacacacrcacacacacacacacacacacacacacaccatgcatacatgcagacatacaaatgatatttattgtgagtatagaaccatttgggacattatkggtcacaggagtgaaaacaaaaagatatgacaccccctctgcccttgaggaccttccaatagaatcagaaccctgtaatgtgcacacatgaaaaactggatttttaaaaggttgaattggaatctaaattttattccatggaaatatctgactaaatttaaaataaaagtgactggtaatgagatttatgggcattcagaggtaggcaagatccctgagggtcagggaatggttcctaaaggaaggggtaccttgtaacatgtaaaataaattattggggttaataaatgtggtgaggaggggagggcattctggatgacaggttcccaaaactgtggtgacttccgtagctgaaaaaatttgagacagtatctgggctaagcaggtgagaggaccacagtggatcagctgtatctgacgtaagtgcaggaggtatgtcaaagaaagccttggaggcagaaatgcttgtgtgttcacaagtattcttcagggacaagttcagtggaggaaaggattgaaactaagcagtagccactaataggagcctgacattttaaagtcctggctttacccaggagggcatgtgtctatatttgactcctcttttaagaagctgtaactgcaagattccctcctggaataaaggtggtctgcatctaccctgtcccatcactgcctgtgctgaccttgacacccacatctgccttcttcttaccttgaccccttctccagcgrtgatttcttggcttgccccctccagtgacatccatccaactccttgctccataccctggctttgtcacctcctttctcccagtgtcttgttgttcagatataacttggtctgtgaacagcccacggggccagtccccatgaaccaactttacaactgggccaatctcatctcctgctactgacttcttcctattcagacacttcagcctctgagaatccagtaaatggtggagccaactcgtcctgtcccagttgcttctcctgtatcctctcttggccagatagaagcctctccaagctatgcctgaagttcagtacctccttcaatgtgtaattagtttgattggtggccacaagatggccatatatgacatgccccagggccctctgttacggctcccatagtctacaaattaacaggggcttgccaccactataacctcatcatggctcaccttcctgctgcttctcaactactgttctgccaaacttcaacaggtacccccatcttcagaaatgtttcagctctagctgcctcaggaagatggggcttgcctctctgggtttcccattctatcgcttgatcagagataggttagaccctgagtcaaggggccttttttgcatgttaaaaggtagcagcctccacgttagtaagtataacccctaaccccctttactgggagtgccaaactggctcaagtggaatagactgggacagactcaaaagggattaaatatggcctgcaatgccaacaacttcttaacatcccagaaacagggcatgtgtctacaaattatagctaagctaatagatcagctggtcctaattttcctgaaatttgggattagctaccagaactgttcccaaaaatgtctttaaagtgggcgactccgttctaagttttccccacaaagcctgttttccaactccccagaaacttaggagttctcatgtaaggaagtagttcctgaaggcgtgaaggttcctcaagrcatgaagaaacatcaaaggtttttcagtagatgagatatgctgaaagccatgcagaggaaacctgctgtgacctcagtaggaaaaaactaaacaaacaagcaaatgaaaactagaggtaggggcctgtggaagctgttccatttgtccaagtgagaggtgtctggagattatagtggacagaagaatcatcacgagaggaacttcagggcytgggaactgactgcagagggggrcaggatagcaggcacggcacaaatgactgcacgtgcagagcctcagcacagacacctcacccagattccagaatcacgggccaggctgaccctcttcttcctgatcatggtcggtgttatccccacctccatgaaggcatggcagctcagtccaggcatttggccagaggcatgggctcgattcttaggtcgctgctgaggccctgagcctgggactttctatggcctcctattgtggatttcaggcttctctggccttagagccctggggagaggctggcaggtaaataaagagaagagcagctagcagaaaccttttgtaaatgactctcctggctgattgaaaatttgtggtcatttgtagagcttgaggaccctcagcctcccccagaccacattccttggattacagctgtacttccaacagttattatatgtgtgatggttttctgtctaattctatggaaatggaagaagaagaagcggcctcgcaactcttataaatgtggtgagtgagtccttgtcctccccacagactgtcactttgcacctacttcccaatcggctggctgccttccggagcttgttggctgagcctagactggcaaaaagtcaggaagttgttgggaaaaaaggttttcccttggagttttgagcctatacagactggcagtagcagataatgctgctcttggacttcaaagaaaggcgacatttctaacctctggtttacaaatgtacttctggtttccagggaaaactgattattacttgctttatctacctcacttcatgaggttactgtgacatatacataaagtaaaatggtgaaaccactcctaaatgttaaagattgtggacctggtggtgtttaagcagggatatttgctaaatgaccacaagaatcagcttctcgtctctaaaaaaatctaggtttcttatgaaataagttagatgaattattgcccattgacttataacaaacaatattaactttaactaatttctaagtaatacatatccattatcatatataccaaaaataaaatmatctataactccactaataagaaaaaatgattacacaaayatttttggtgcctatctttaagatttttctgtgtatcaatctatgttgttttccataattaggattatcataagggttatttttcacaatttggataatatatgtactgtgttctaattttgttatactaaatgtagcaagacaattttcaatgtcataaatatcattctacagcatcattttwaatggctgcaagatattcccttttgtggatacaccataatttatttatttaaccaacctcattttttggacacttgagttagtccaatagttttgttattataaacaccctccccactgacttctgttataaaaatgtttcatggggacaaagtggtccctaactttataataatgccatgcctttttgtagtttggtctggttctaagctaagattggactttatctcagtaattgcctccagtagtaattagtttgattggtgctaataattaaggtaaccttctaactcacttatggtagaaagcacaagatgagtattgcctctggccagcatcttgtttttcagtatactgattttaaaatctaactagaaaatagatggatgacattagcagtcattcaatgcatcctgctgtactttaaaaataagaaattggggagcaacgatcgaatttaaataaattaacacaaagcatgtggcagagccattcaaactgccaatgtatggagtgtgctgcgagatttctatgatataaaagtataaaattcctagcacagatgtaaagacatatcatgcttgtccaggctttgacttttcaaggtgagagttttgagcttcactttctttcaacctcattgccatttaaaattagtcaaatatgaagaagtgacttacatcttgggaataagctgtttgctagatttttcttcacattagaatgatcagcttacaaatgaaacaaagaagggttggagaaaaagattaaggatgtttcttcctccatgaggcaatcagaaaaaaatcaggagactagataggggagataaagaggatatgtgtgttcacatgagagaagttagaaggtggttaaataagctctgtaggtacagatgagatggtcagattgggctgagtggcacatacatgacccctaagaatgtaatgaagaatattggtaagaaaaagttatttattcagacagtcatccatgccactgagtttgatcaaagagagaagccttgctatcactgtagggagggaggtgcaacaggtataactatgccattatagatatgatatatttgtaaatttggattctgtaacttcagcaatatctgccattgctttgtgggtactcctggcattggctatgtgataggtaaaataatgccccccacaagacgtccacctcctatactccagaacctgtaatatgttatcttacatggcaaaaggaacttcacataggtgattaaggcaccaagcttgagatggtgagattaacctggattatccaggtgggcccaatgtaatcacatgagtcagagaacctttcctagctgggatggagaaatgaactggaagaaggagagatctgaaacttgagaagctcaacccagcatttctagctttgaagatggaaggaggaagccatgagccaaggaatgtaagtagcttctagaagctggaagtggctctcagttgacagccagccattaaggaaattaggatctcagttctgcaactataaggagctgaattctgccaagagaccaatgtggaaacagcagatccctccacagagacacaagcttactgataactggtaggaatttctccaaaagtggagcttcctcctactccagtgttaatccctttctcagaggagacggtcctcaaactaactaacttggcaccaaaagtcctatccagtgttttctcattatagtttttctatgcctcaactgtatatatttacccagtttaggctgtttaaatgaataaaaaggaaatgccatagttattctagccagtttccaatctctcttctctttttttgttttgtcaaatagggcagataaggcatgagaatttataactatgaattactgtcttttcccaaacagaaatcaccctatcagcttacccattgggagaaaaactaaaatagctccccctgaaattttacttcctcatttgggtcttgtgtgactgaaatctgtatacaatgccctagcaacaacggtttttacagcttgcctccctagaacaaacctaggagtctcagctgtttcaggaatgatttcttaaaggtaaagtgcctttttcaaaagaaattattattatttttttttaattttttttttgtgtgtgtgtgagacagagcctcactctgtcaccaggctggagtgcagtggcacgatctcagcacactgcaacctctgcctcccaggttcaagcgattctcctgcctcagcctcccaagtagctgggactacaggcacgtgccaccaagcccaggtaatttttgtattttcagtagagatgggttttcaccatgttggccaggatggtctcgatctcttgacctcgtgatccgtttttaaccaacatttaaacagaaatattcacaggcttaaagactgaaagttagtgatatcatcacatttccccttcaaaatgctgaatttataagcaaatttaaaagtttagaatctaccttttaattgwctgctttcatttttttgacagtggctttttttgatatggtgactattttgtcatgggtataaaaggataattcattttgtgttaatctgaagacatctgaaatactgtattcaactataagtacctttttttacatttataagattctttttcaaaatttttatttgaatagttttttgggaactactgaactaaactaggtggtttttggttacatggataagttatttagtggtgatttctgagactttggtgccacctgtcactcgagcagtgtacactgcaccagtgtgtagtcttttatctctcacccctcccactctttcctctgagtccccaaagtccattatattattcttatgtctttgcatcctcatagtttagctcccacttatcagtgaaaacatacaatatttgtttctccattcttgagttacttcacttagaataatggtctctggttccatcaaagttgctgcaaatgccattattttgtttctttttatggctgagtaatattccatgagggatatttaccacattttccttatccactcatgggttgatggacatttaggttggttccttatttttggaattgcaaattgtgctgctataaacatgcgtgtgcatgtgtctttttcatataatgaattattttcctttgggtatatacccagtagtaggattgctgaattaaatagtagagttctacttttagttctttaaggaatctccatactgttttccatagtgtttgtactagtttacattcccaccagcagtgtaaacatgttcccttttcaccacatccatgccaacatctattattttttgattttttaataatggccattcttgcaggagtaaggtsgtatctcatggtggttttaatttgcatttccctgatagttagtgatattgaactttttttcatgtttgttggccatttgtatattttcttttcagaattgtctattcatgtccttataaacaccattatttttaagaagaaactttacaaaaatagaacataaccagatttataaagcatctgggaactcagtcaattaagaaatagctcaagtaactgatgatgcttcacctgaaagaaggcctggagagaacagagatactgtcttcaaatatctgaagagctaccatgggatgcaaagattgagcttgatggtatgactctgaagggcatctctatgaatgaaggttatgagagggtataaggaattaagagagacttttctaacaattaaaaggtcttttaggccaggggtggtggctcacacctgtaatcccagcacttttggaggctgaggcaggcagatcaccttagatcaggagttcgagacccgcctggccaacatggtgaaaccccatttctactaaacatacaaaaattagctgggtgtggtggcaggcacctgtaatcccagctacttgggaggctgagagaggagaatcgcttgaacctgggaggcagaggttgcagtgagccaagatcacaccactgcactccagcctgggtgacagaagatcaagattccgtcttaaaaaatataaataaataaataaataaataaatagtctttaaaattgtatagaagaagtagacttctgcttcctccaacaaaggattaactgctataggaattgccctctttccataaacaactagaaagcagacaaaatatatgaaacaactgttttcagagatcggatgacagacagcagaaaactgtagtccctgagtgaaggaaagaaaaaatgagataagccctatgattgctctagtttgctgcctggagccagtgtccaggcccctctgaaggcaggggagccctgatactgaactaggaaaagacattgcaagaaaagaaaactacaaacatctctcgtgaaatgcttaacaaaattagcaactaaaatctagcaatatgttaaaagtataatacatcatgatcaagtggggtttattcaagaaacacaggtaagctcaacattcaaaaatcaggcaataacctttactacataaataaactaaaaagaaaaaaacatatgatcatgtcaatggatacaggaaaaacttttgacaaaattaatacccattcatagttttaaatggaaagaaaagctctcataaaaataggaatacaagatgacttcctcaacctgacaaaggacatctaccaaaaattcttctgttagcataatatttcatgatagaagactgattgcttttaccttaagatggcgaatgtggggaggatgtctactctctctacttttgttccacattgtactggaggtcatagccagagaaacaagactagaaaaagaaataaaagacatacagattggaaaggaagtaaaactgtcttttttcacagataatgatcatgcttgtagaaaatcctgaggaatctatcaaaaacctattaaaactgataagtgagtgtagcaaagacacaggatacaaagtcaatacacaaaatcaattatttctatrtactaacaaaagcaattgtacattgaaaaaaattaatagcatttataatagcatcaaataatattaaaaacttggaaataaatttaacaaaacaagtacaaggtctatatactgaaaactatacaatattactactggagaaattaaagtaaaccaaaataaatggagacataggccatgtttatgaatcagaagactagatgttaagataaccattctctccaagttgatctatggattaaatgtaatcacaatcaaaatcctggtaagctctctaatagatactaaaaatcttactcgaaaagttatagggaaatgcaaagaatctacaattgccaaaacaattctgaaaaataagaacaaaggttaaaaatacaaaattagccaggcatggtggcgcatgcctgtaatcccagctactctggaggctgaggcaggagaattgcttgaayccgggaggcagaggttgctgtgagctgagatcgtgccattgcactccagcctgggcaacaagagtgaaactccctctcaaaaaaaaaaaaaaaaaaaaaaaaaaagamcaaaggtggacttaacctacctaatttcaatatttactatatatagtaattaatacagtgtgatattggtaaaaggacagacatatcagtcaatggaacaaaatagagagtcaaaaatagattcacactgttgacaaagctaccaaggtaattccatgcagaaaggatagtattttcaacaaatagtgttgggacaattagatatccacatggaaaaagtatgaacctagacacacacaaagtaacttatatattaagaattaaaatgaaaggacttccaaaagaaaacagaggagaaaatctttgtaaccttaagttaggcaagtcttcttagataggacacagaaagcaaaaaccatatcataaaaagataaaatggatgtcatcaatatggaaaacttttgttctttgactttgtttaaaaaacgaaaagtcaaaccacagacagggagaaaacgtttgcaaaatatatatctgataaaggacttgtatccagtatataattacatattgctactcattagtaagaagacaatccatttaataaaaggcaagaagaagagacttgaacagatacataacagaagaagatatacagatggccgatgagcacagtcacaacatcattagtcatcagggaagtacaaattaaaacgataatgagataccactgcacaccctctagaatggctaaaattaaaaggtctgataaacatcaagtgttggagaggatatgaagcaactgaaactctcatatactgctatacaacccagaaatcctagacatttaccaaacagaaattttaaaaaatttaaaaatatataaagactcatacacaaatgttcatagcagcttgcttcataataccaaacctggcattctaaattttcatcagttggcggtggtatatttatacaatgaaatactgcaaagctatagaaaggaatggactactaataatacacaagaacatagataaatttcaaaagcattatgctaagtgaaacaatccaggcacaagaagaatacacattatacaatttcatgtatatgaaatttgagaaaaagcaaaactattttaagtagattcatggttatccatgggatgggggaaaggaatcagctgaaaagcgaactattttggcttataaaaatgttctcgatcttgattgtggtggtggttacgtgactatatatattcgttaaaatcaccaaactctaaactgaaaatgattgggttttattatttattaattatacctccataaagctgattgtttttatcttttrtttttattttatttcaatagtttttggggaacagatggttttcggttacatggatgagttctttagtggtgatttctgagattttgatgcacctgtcacccgagcaatgtccactgtacccaatgtgtagtcttttatccytcatccacctctctctcactcttccccccaagtacccaagtccattatatcattcttatgactttgtggcctcataaaagctgattgtttttaaatacacacatacacacataaaagagaacttccagtgacaggaagtgttcaagaatgctctatttagtaaagacagaatcacaaaaccatcagaggtattgttgagtggattcttgtggtctataaatacctccatggacacccaggttagcaacctgttggagtttacgtgggacaatagcatcatcacaacagtcagcctagagaaatttacatcccaagttgtgtcagtagcaagtccctatcaatagcaactcaggctttgtgaggtctagctggctagaaatttcccacttggccttgcccatgcaacattgtgtaatattcttagcaccatctggctagccgatttaggcatcaacatcttcaagacttcttctcctcctccttataaaccttgctttcagaaaaggattagaaactcttccaatcacaaaatgattgctaaaactaaatatattacccctcccaatggtattttttggttagccaggatagagatataagtgaaaaatctatttccagtgttagaatttaaggcacagtgagaaagggaaggcatatactttttgaatgcaagaaacttcttcccaatccccctgaaattgcatcatttgagtaactatctcttccatatataaagtcacaacaatttctctctcagtcccagaactttgaagccttttcaaactttccttcttttggtatctaggaggaatacatttttgaagattgttcttggtgtctttcaggaaccaacacaatggagagggaagagagtgaacagaccaagaaaaggtaaatcctgaccctgagacattgatgagagaggtataatccccagagtgcctgttacttgaataggcttatgcctaacatatgttgagacctcagcaaacctgaactaatggagagggagaggaaaataaaactagttaagaactggaagaaaataacctgataatggatgacaggktatccaatgcacaatgcccagaaagcatgacaagctctgtcatggtcaagtaaaagtcaataccaaagacttcagaggtggtgaacatgggcttcatcttatctgccacagtaaccccagtacctggcacagtgcctagattagtgggcatcctacatgtgtggaatgaataaatgaagaagtggggaatgataacatgtttgcttcagcctgagcatcttagtatttgctatggccctgtttagatgttcttctgycacttctttacctcattcttcagatcttgcctcaagcagcactttcttaaaaaccctttcccaaactagaaaatgtcaacttgttacagtgtcatgtggatcccttggctttttcttaataacaccagattatgcttacatatttgtgtaattatcttattaaactctataaactagacttaactaaatcctatgaagagcagagaccataccagttaagctcatcattgtgctgctagcacttagcatggtgcctggcatatagcaggttctcaataaatgttgaaagaatgattgatgcatgatgaatacataaaagttcgtggtgatcagtcctttcacaacgtgaagctatcagatagtctgtacctctatccctcctgagaaattaagctctcaggaatatcaaggctctgactgcatacccataggatcaaagcaaccctcagtcacaagcctggtttcagagatagggtcataacccccagggtgcagagacaaccgagagtacccagcactaatccagatataccagccactgtgattctagcaacaaaactaataattccgggcacccttggacaatgagaaagggtgctgaaatcctgcctaccctgtcacactcagtttcagaaatggtctggaagagcctgcagagggcaggcagcagagaaccggcagagggcatgggaagggccaggcagaaataaagggtagctcttgaagcatagatgacagtgtagaccgtggttcttttctcttgctttctccacctttctcttcaatagtttgtttctcctcattgctgttccaatggcaacctctattctgccctatcattgaaatctagaaaaagaaagtagctcaaatgtgaaatatcacctaatcttttcttctatttctccagagaaaaaatccatatacctgaaagatctgatgaarcccagcgtgtttttaaaagttcgaagacatcttcatgcracaaaagtgatacatgtttttaattaaagagtaaagcccatacaagtattcattttttctaccctttcctttgtaagttcctgggcaacctttttgatttcttccagaaggcaaaaagacattaccatgagtaataagggggctccaggactccctctaagtggaatagcctccctgtaactccagctctgctccgtatgccaagaggagactttaattctcttactgcttcttttcacttcagagcacacttatgggccaagcccagcttaatggctcatgacctggaaataaaatttaggaccaatacctcctccagatcagattcttctcttaatttcatagattgtgttttttttttaaatagacctctcaatttctggaaaactgccttttatctgcccagaattctaagctggtgccccactgaatyttgtgtacctgtgactaaacaactacctcctcagtctgggtgggacttatgtatttatgaccttatagtgttaatatcttgaaacatagagatctatgtactgtaatagtgtgattactatgctctagagaaaagtctacccctgctaaggagttctcatccctctgtcagggtcagtaaggaaaacggtggcctagggtacaggcaacaatgagcagaccaacctaaatttggggaaattaggagaggcagagatagaacctggagccacttctatctgggctgttgctaatattgaggaggcttgccccacccaacaagccatagtggagagaactgaataaacaggaaaatgccagagcttgtgaaccctgtttctcttgaagaactgactagtgagatggcctggggaagctgtgaaagaaccaaaagagatcacaatactcaaaagagagagagagagaaaaaagagagatcttgatccacagaaatacatgaaatgtctggtctgtccaccccatcaacaagtcttgaaacaagcaacagatggatagtctgtccaaatggacataagacagacagcagtttccctggtggtcagggaggggttttggtgatacccaagttattgggatgtcatcttcctggaagcagagctggggagggagagccatcaccttgataatgggatgaatggaaggaggcttaggactttccactcctggctgagagaggaagagctgcaacggaattaggaagaccaagacacagatcacccggggcttacttagcctacagatgtcctacgggaacgtgggctggcccagcatagggctagcaaatttgasttggatgattgtttttgctcaaggcaaccagaggaaacttgcatacagagacagatatactgggagaaatgactttgaaaacctggctctaaggtgggatcactaagggatggggcagtctctgcccaaacataaagagaactctggggagcctgagccacaaaaatgttcctttattttatgtaaaccctcaagggttatagactgccatgctagacaagcttgtccatgtaatattcccatgtttttaccctgcccctgccttgattagactcctagcacctggctagtttctaacatgttttgtgcagcacagtttttaataaatgcttgttacattcatttaaaagtctacattttctgctttggcttcaagagtactactcaacccttgtggtctgatgttccctgctctgtcctctgaatgtacttcctttctctttacatctctatggctagaagcctctcacgcatcctgtatcttctcctcctcccttttccctaccattatttgagaaaggaggcttgtatacttctatatgtttatctcagtaataagtcataaaaaatcaagtaagaatggttgtttttgaggacaactaagaaatctggaataaggaagggaagcttacttttgagtttgtaacctgtagtgtgtaattttttaattatgtacttacatgtacattaaacaaaagcttaatgtaaaaatattccttgaaaacaccatgattataaaataaatgcatatatacatacagcatgtgagaggagccaggaaaactctggaaaaaagaaaattacctagactctgtgagggcaggaatgtgtttaatttctctccaatggatcctcagacaactaagatagttgtctattctattgtccatctttttgtcttttgttgtatttcttaaagattccctcaactttatcttctaacttctgttgtatttttatttctgctatcatgtattcttttcagaattcttttttgttctctcaaaacatatctgtttaaagattgaatgaaatattaacatgccctttggtgagaacatccctcctttgtatattaaattctctgaactgctgtattctaagactaggggaaagaaaaagaaggttgaaagaggtcattaggcagaatagtactagctaacattatttcacatttaccatatacccgtcactcatctaaacctttaaactcattatcctatttaatcctcacaatgaccctgtgacgtaggtaatggaatattatgcccattatgctgatgagaaaatataaacacagagataagtcagagtaatttacccaacattgttaactttgtaagtggcagagctttgtaacaggcagaggttggaacagtttggagggctcagaagaagacaggaagatgtaggaaagtttggaacttcccagagccttgttgaatggctttgaccaaaatgctgatagtaatatggacaatgaaatacaggctgaggtggtctcagatagagaagaggaacttgttgggaactggaataaaggtgactcttgctatgttttagcaaagacactggtggcattttgcccctgccctagagatttgtgggactttgaacttgagagagatgatttagggtatctggtggaagaaatttctaagcagcaaagcattcaagatgtaactttcgtgctgttaaaagcattcagttttatgtattcccaaaaatatggtttggaattggaacttatgtttaaaagtttggaaaatttgcagcctgacaatgtgatagaaaagaaaacccattttctgaggagaaattcaagccagctgcagaaatttgcataagtaacaaggagccaaatgttaattgccaagataatgggaaaatgtctccaggccatgtcagaactctttacagcagcccttctcatcacaggccaagaggcctaggagggaaaaacggtttcctggccaggcccgaggccttgctgctttgtgcagttttgggacttggtgccctgcatcccagccatggctaaaagaggccaagatacagttcaggtcatggcttcagagggtgcaagccccaaggcttggcagcttcagcacagtgaacctgcaggtgcacacaagtcaagaattgaggtttgggaacmtccccgtagatttcagaggatgtatgggaacacctggatgtccaggcagaagtttgctgcaggggtagagctctcatggagaacctctgcaagggcagtgcagcagggaaatgtggggttggagcccccacacagagtccccactggggcactgcctagtggagctatgagaagagggccaccatcatccagaccccagaattgtaggtccaccaaccatgcgcctggaaaagtcaccgacactcaatgccaacccatgaaggaagtcaggagggggctgtaccctgcaaagccaaagaggccaagctgcccaaggccatgggagcccacctcttgcatcagcatgacctggatgtgagagatggagacaaaagagatcattttggagctttaagatttcactgccccactggattttggacttgcatggggcctgtagcccctttgttttggcaaatttctcccatttggaatgggtatatttacccaatgcctgtacccccattgtatctaggaagttactaactttcttttgattttacaggctcataggcggaaggtgcttgccttgtctcagatgagactttggacttgggacttttgggttaatgctggaatgagttaagactttgggggactgttggaaaggcatgattgtattttgaaatgtaaggacatgagatttgggaggagccaggggtgaaattatatggtttggctgtgtccccatccaaatctcatcttgaattgtagttcccataatctccacgtgttgtgggagggacccagtgggaggtaattgaatcatgtgggcagttacccccatgctgctgttctcatgatagtgagtgagttctcatgagatgtgatggttttataagaggcttttctgccttttgcttggcatttctccttcctatcatcctgtgaaagaggatatgtttgcttccccttccaccatgatttaagtttcctgaggcctcatcagccctgctgaactgtgagtcaattaaacctccttcctttataaattaaccagtcttgggtgtgtctttattagcagtgtgagaaggaacaaatacattaacccaggcttgaaagcaaagagtcatctctgatgactgcattcaacctttccctcagcacccactgctcaccccttcgctcctgcctcattctgttatcagtcatcactaggccaggaaagcattcctcccactttcacacccacctcttattttctcattcaggaccttttttattcataccaaaaacatgtcagtcacctcccaactgatcccagtctcctatctctcttacccttcattctgtccaacacaccaagagaaacaagaaggtaaatagtgaaaaggtctccctcacattccctttccctagccacacaactctgatctccagcttcctgggtatccattcgtagtcacagtatgcctatttttaagtgtgtgtacacacacatacacatattccccttactcaggcagatttggttttactttacactacagtctaaagaaatcagaatactcttgctaggatgattgacatcagtcttcagtgtaatccttcatattaaaaacatacatctgtatgtataagttttcattctcaccaatattctagcatcattgtggatcttataataaaagtgagattccattggattttattatgtctacctgttcacttcagaagaaaagatacttacagatatagaatccttcactgtccttagtcacaaagtttaaaacctgctccaatctgaacaagttacaccctaggtctggtgagcaacagttaccctgaagggatctcccaattcctatgtccatatagttgtctttcttgatttaccccctcactttggtggtgcatatccttcagtagcttgatccagcagctttctgagaaaggatctgtgggaaatatatttaatgaaattttatgtatctgaaaatgtctttatcttactttcctgcttaactattaataattttgcttggtataaaaatttgggttggaaattattttcattgtccatagtttccagtgttgctcttgagaaatctacaaatattctgactccttatctttttacatgaaagcttttagaatctgctcagtgttctaagattttgtcatgaaatgcctgtttgtccattgtgattaacactcagatggacttttcttctggaaactcatgtcctttcctccagggaaattttcctgaattatttcattgattatttttcccctctatttcactagtctctcattttagaatgtcagattcctgaatgttgaatctcctagactgatcctccaattttgttattttctctcctgttgcccatattttgttttttgttccatttcctagagattttctcaagtttatcttccagcctttctgttgtactttttacttctgctatcatgttttattttcagagctcctttttgttttctgaatgtttctttttgcaaggagcctgttcctaatggttgaaatattatctcttaactctcttaggatattaacgattaggttgtttgtttttaaagttttatattccaagttatttcttcctgtttgtttgctttgatctatatcatccatgttaaaggattcccagctgtctgatgatacttgactgtctgttcacaattaagagtgaaaaactaaaagtttggaggatctgagtttatggatgggtttgtcaactttagcttcatggtagagggatctggagcaagacatttttaggaaatcatttttagatcttcttttttgagctggtaatttttcagtatcttgcttggaaggtagaggtatagctgctagtattttgggagccaagtgagagaagaggggtgggtgtgagtagtgatggaacctctgcattccttattcagtatgcataaatgtacttactccatgtgtttttagtacgatagccctatcgtacttgtagcatgtggcaaagtggtttctcttcccgtgacctgattataacattgattcagattaaacattgtgaactcagtttcctaaatataccaagtacaaagtaaaagtcactaaattgtcctaacagtttactagaaatggaagaaattcagaaagcaatgaggagaaccttcccattgtatgtggtacatgagggcagagaagggagtaattcacccaacaccaaaaagagccatgaccagaactcaggttcctgatttttcagtccagggttcttcccaccccactgtgcccctctaaacttcttgttaactggaagagctggaaaatgggtgtcaacagagcataatgaaggaagatcatggactttaggtcagatagacctgacaccactacacttgactgtgtgaccttgggctaattacttaatctctgattttcagttttcttatttgtaaaatagggataataatatctacctaccttacaggatcaagggcaatccaaaagataaggattatactgtttaaaaaaggaaaggaaagaaaaataaaagagccacaacaaacaagcaattgggtagcttgtttcaacagggtgggcttgaggatggtgagtgagaattagtagtgggaggatggcaacttcatgtgaggctgatgtaggaggagttgtaggttgggctgtacatggattaacaggcgtgggcttggattctttcatataacactcagcccagaagtcttccaaacaccctgctgaaagccagaaatgctcctacaactcctcctgcatcagcctcacatgaagtcccactctcaggatctcaacttagggactgagatgattcatgctctcaccttatgcacgtggaacttttccaactttaccttctgagaccaaagccaagttcctgggacctttatctttcctttgtcaagattatttccagacaatcaataatatctacttctttgtgaagataacaggaagctcattccttactaaatataacatgaaattctaagcagttaagctgagaataaaaaggaccaaaggctcccagttaatatttcggaaagcccttgtcttgaggagcagccatgtagaggatggtttgtatcagggagggccgtgcaaattggaggcaggtataccaattaggaaacagacatagttagcctcaacaa

SEQ ID NO: 8683 - DNA, 21179 bp, Homo sapiens
  misc_feature (1)...(21179): n = A,T,C or G, or insertion/deletion polymorphism (see Tables 1-2)
ttctgtcagacataattcctcagtttagccttcccacctctatacagtctgataacagaccagcctttattagtcaaatcagccaagcagattttcaggctcttagtattcagtgaaacctttatatcccttatggtcctccgtcttcaggaaaagtagaacggactaaaggtcttttaaaaacacacctcaccaagctcagctaccaacttaaaaaggactggacaatacttttacgactttcctttctcagaagtcagacctgtcctcagaatgctacaaggtacagcccatttgagctcctgtatagacgctcctttttattaggccccagtctcattccagacaccagaccaacttagactgtgccccaaaaaaacttatcatccctattatcttctgtctagtcatactcctattcaccgttctcaactactcatacacgccctgctcttatttacactgccggtttacgctgtttctccaagccatcacagctgatatctcctggtgctatccccaaactgccactcttaactcttgaagtaaataaataatctttgctggcaggactgtgctgaatctccttaggcactctctaatcagatgtcctgagttgtcccaattcttagaccttttatacctgtttttctccttctcttattccatttagtttttcaattcatacaaaactgtatccaggccatcaccaataattctaaatgacaaatgttccttctaacaaccccacaatatcaccccttaccacaaaatcttccttcagcttaatctctcccactctaggttcccacaccgcccctaatcccgctgaagcagccctgagaaacatcgcccattatctctccataccacccccaaaaattttcgctgtcccaaaactttaccactatttagttttatttttcttattaatataagaagacaggaatgtcagccctctgagcccaagcaaagccatcatatcccctgtgacctgcacgtacacatccagatcgccggttcctgccttaactgatgacattccaccacaaaagaagtgaaaatggcctgttcctgccttaactgatgacattttcttgtgaaattccttctcctggctcatcctggctcaaaagctcccccattgagtaccttgtgacccccactcctgcccgccagagaacaacccccctttttcctttaccttcccaaatcctataaaaccgccccacccctgtctcccttggctgactttcttttcagactcagcccacctgcacccaggtgattaaaagctttattgctcacacaaagcctgtttggtggtctcttcacacggacgcgcatgaaatgtataatgctttgtcagctccaaatcataccctcaactttccattttacatctccgaaatctggatgtatcttagagtcgatgatgcaattataattggtagcttcctttctttatgttagtacataaaaataagggtgcatcctacaaatgatggcttctgagattagataaaatacctttctattagctctgtggttctctgcctgtgtattgccaggaggaaggaagtggagcatttcaggtgaggcacagggttttggtatcaattcctaagattcctttcatggtccagcccctggtgtgcattatcctacagttcctccctctatcgcaccctcagccacttggtgtgtctccttatttctgctcctcttgcctaccagcatgtgcctgatgactgaatcctgcccacccaaatgtcaagagcctgccagagatggcttattctcctccactctcctcagtgcatgtgggtatgtgtgtttggagatgactggaaaagcacagtggctacccattaaactgacttaggggtcacactagagaggaagaccatgaagaaaactgagttccagcctgacagcagaagggcagagctttctgggctactggctctaagggcaatgcatatatctgctgatttaaaataataataacaataatggctttgggtttccttaggttatcctccaacccaaagaaaccagtgggcagacatgtatacatggagtggactgggtcagctctttggcttcctagcatgttctgccatctctttttttctgatgacagaacaagcccttgcccacagggtaaaaacctgatgccagcctggccccctggagtccttctaggaccctggaagagagctgttctctttctctttgttttgttaattttaagctgcttccttgccatgcaaagagagaaagcccaagcaaagaccagcataggcagagagccggtagagcggcctgggtccttgtatcctgtgaagcatcacggttatccttctctgcacatgggccagtgcattcctgttctgcttaaacaagcttaagttgttccttcgagtcaatacaakataagatattttaaacctctctctactttaaactatccctctagcttagctgttctttttgaaagttatttgcaacaaacaattcaagtttgagatttgggagggcagaatgcccatattctgtgttgattgaaaggagattcctgggccttaggtccctgctttggttgagaagttgtgatgataattaaagagcctgcgtagattctcactagaggcagggctctgccttgagttgggtcggggtgccaacaggctgctctggatttatccgaagtccttatcagggtaccggatggggcattcaatgaagtttgcaccataaagccctaagaactccaggcttgaagattctctgcaaaaagtgttaccatagccagtcattttggtttgccataacygataagggcttatctttctgacagcacttaccaacctasttcctctgatttttgagtcatgtcctagaaaaagagctgagcccaaggaactacagcttggaggatatatctgatctatctgcgatggcaggaaagcatgcatctagttgatctaaaaactagatggcattattgaggagttggacaggcggtcttaggaacaacctcgttttatactttttaaaaataggaatttacttaaaggcaacttccatctgctctcattctggcagaggtattgtgataaaggctttcaggaatgtcaacagctcaggattggcattagctcatagataattcccgtctactaaattaaagtctatgagagattgatgcatgcaccagagtcttgaattattaggcaaggatcttgctaaagctggacatgggaaggttgctatgaaactcatttcaaaggctgtgtaggccaactcacctctgggaaaccaacgcttattattaaaccaatgcaactgctcaaaaactaaaactccatcactatctaagttccccatcatggtgtgtgaaatcatttccagaaaactcttcaaaagataccgaataaaaggcatcacaggccgggcacggtggctcatgcctgtaatcccagcactttgggaggcccaggctggtggatcacctgaggtcaggagtttgagaccagcctggccagcatggtgaaaccccatctctactagaaaaatacaaaaattagccgggtgtggtggtgcgcacctgtaatcccagctacttgggaggctgagccaggagaacctggcaggcggaggttgcagtgagccgagatcacgccattgcactgcagcccaggtgacagagtgagactccatctcaaaaaaaataaataaataaaaataaaaataaaaaaagccatcacgaaaagacatttctttatcaggtcagcaaattgattgctggtttcaatctctcaagaagtcagattctcttcagacactcctttgtgtttctttacaatgtaatcagtcattccagggtcagctatgaggcacactcccctggcctccctcataagcaatttaattgcaaagggttagcatactatttcttctctgctattctcagaattctcaattatgaaaacaaaaacaataattaaaaagttcttccagctgattttttttttttttttttttttgagacagagtctcacttaaactctgctgcccaggctgtagtgcagtggtgcaatctctgctcactgcaacctctgcctcccacgttcaaccaattctgctgccttcccccctgatccccgagtagctgggattacaggtgtgcaccaccacgtccggctaacttttgtatttttagtagatggggtttcgccatgttggccaggctggtctcgaactcctgacctcaagtgatccgcccgcttaagcctcccaaagtgctgggattacaggcgtgagccactgcgcctagccccacgtgcatttttttttttaagggaggcaggaaagaaggcatttgggcctcttatctgcaattttcttccgtgtaaacttatgtgaaggatctggagtgggacttggtggcttcaagccctggctccacttcttgatggctgcgcgacctgggttaagtcacgcaacctctctgaaccctagtttattcatctgtaaacaggtcaataatagcacgagattcgcagcgcgagtggagctcaaagtgcagggttgtccctggtgaacctatcacttttatatttatcctttgatgaagccagtacaattcctacctggttaaccagatacatcccacctcttccctcgagttcgcccttccccccgcctcgtgaagtccttgttctcttagctgtcttgaaaatcctatgcatcagcatgtaggaaagggcgcgccaggcgggggaagccacccccgcccaagcgcctccggcttcccttataaagggagggcccccttcgcgaccgcaagcgcgcccaggaagaccacagagccgccggtgcgcassgaggtggcgatacgcgcccgggctcggcctgcgggtggtggcccaagcgtccgcctcgctggcctggcaggcgcgactgtgcgtgcgcagccgagggtggtggcggccggcaccccacgccaagggtggtggtggccggcaccccaccctcggccgccgcctccgcgtgtcaggtgccgtgagaagcgcgggaggagcggccgcaggcagcgcccagggatatgactggagccgactttccagaagcggcgcacgcaaagcccagctccgcacgcaaaggggaggcgacassagaaacttcaacccgataaagttcgccggagcgcggagattcgcctcctcctgccactctccgccccgctcgggtcccgccccgctagctcccccaggcccccccagtcgccccagcttggctccccgccctgcgccaacggcttccatcgcagcctgggcggccccgcgcccaccagcgggcggcgccacctggagtggcctctacgcgggaaatctcagggccagctgcgccccaggagcctttgtgtgcccaagcactgtcggggccccggggcgggggagcggctacttttagggattcctgatctcgccgcaagaactggaaaaaatttagcatgccaaagagcctccactgaggtggcaatttgtttgcgagaacctaagataaaatttaaacaaccaaccaggggcgctgtgaggcaaaccgctgccactacactggctttccgggaagcaagctcaagtcgcggagagggaagggaggtcgtgcgctcggggcgrggcgcgctcccaagtcgagcgcagcggccggggcaggttgtaccgagcgtggttctggggacaccgtgcggcctygattggaggtggctgtgatgaagcgcggttaccgcacaatggaaacgtgggcacctccgctcccatgaaagcctgctggtagagctccgaggccggccggtgcgcctggacgggagtccgggtcaaagcggcctggtgtgcggcgcgccccgccccccgcaggccccgccctgccaggtcgcgctgccctccttctacccagtccttaaaacccggaggagcgggatggcgcgctttgactctggagtgggagtgggagcgagcgcttctgcgactccagttgtgagagccgcaagggcatgggaattgacgccactcaccgacccccagtctcaatctcaacgctgtgaggaaacctcgactttgccaggtccccaagggcagcggggctcggcgagcgaggcacccttctccgtccccatcccaatccaagcgytcctggcactgacgacgccaagagactcgagtgggagttaaagcttccagtgagggcagcaggtgtccaggccgggcctgcgggttcctgttgacgtcttgccctaggcaaaggtcccagttccttctcggagccggctgtcccgcgccactggaaaccgcacctccccgcaggtcagtctgtctgccgaggcgctgcccggcgacctcttcagatggattattacaggtagcgggtggcgtggtaggtactttaaaggaaatcaagcgccaccgcctcgatgcccgcagcgttgtccccarattgcaggaaccgttacgcgccttgcggggaggggaagggtttggcgctgggttacagcgaggtggaaacacgccccttctyttctccaagggagagtgggttggggatgggaaggggcgtcttcggccatttctccagagagtcagctccgacctctccacccaacggcactcagtccccagaggctggggtaggggcgtggggcgcccgctcctgtctctgcacccctgagtgtcacgccttctcctytctgtccccagcaygggcaccagcctcagcccgaacgacccttggcygctaaacccgctgtccatcyagcagaccacgctcctgctactcctgtcggtgctggccactgtgcatgtgggccagcggctgctgaggcaacggaggcggcagctcsggtccgcgcccccgggcccgtttgcgtrsccactgatcgraaacgcggcggcggtgggccaggcggctcacctctcgttcgctcgccyggcgcggcgcwacggcgacgttttccagatccgcctgggcagctgccccatagtggtgctgaatggcgagcgcgccatccaccaggccctggtgcagcagggctcggccttcgccgaccggccgkccttcgcctccttccgtgtggtgtccggcggccgcagcatggctttcggccactactcggagcactggaaggtgcagcggcgcgcagcccacagcatgatgcgcaacttcttcacgcgccagccgcgcagccgccaagtcctcgagggccacgtgctgagcgaggcgcgcgagctggtggcgctgctggtgcgcggcagcgcggacggmgccttcctcgwccygaggccgctgaccrtcgtggccgtggccaacgtcatgagtgccgtgtgtttcggctgccgctacakccacgacgwccccgagttccgtgagctgctcagccacaacraagagttcgggcgcacggtgggcgcgggcagcctggtggacgtsatgccctggctgcagtacttccccaacccggtgcgcaccgttttccgcgaattcgagcagctcaaccgcaacttcagcaacttcatcctggacaagttcttgaggcactgmkaaagccttcggcccggggccgccccccgcgacatgatggacgcctttatcctctctgcggaaaagaaggcggccggggactcgcacggtggtggcgcgcggctggatttggagaacktaccggccactatcactgacatcttcggcgccagccaggacaccctgtccaccgcgctgcagtggctgctcctcytcttcaccaggtaaagcctctgggaggcgtgggccaggtcttttctcctctgaaaaaggcggagtagagacagaatatgctgagtttgcaagcagggccccgggtttggggtttcgctccaggtccccacccctcaaaaccaagatcgcgtcggtaaagggactcacagtgagggctgcgacacgcgcacgcgccccacccagcggtgccccgacccctccggtctcctatcttgtctctatcgtcccctcccctgcttgcgagtgagaacacatttgcaaagayccctccaccccccggaaaaacaagagtttttaaatgcttggagatgagccctgatatctctctccctggcgcattacaatcagaactggaatagttccgaaagaaaaggtaatgtcataaatatgttaaacacagcagcctctcctaggctagtcctcggcgtgcatccgaggccgcccagccctggcgctaaaagcgggccgcccgtcagggctttgttccaggccaaggaagcccatggaggccgggccagccgacaggtaacccgcacagaaactttcagaaggcggccacaactagcgggcagcgctaggtttataaaacctccgcgctaggagtttgagaaatgccggggtagaagacaagaagcagtcacttttacgaaagcagagtagcattcagaaaggcagatgggatatccaggaggcgcctgcagacgtttctggcccctgcgcttggctcagttagcggaccccctgatgcccacgttggtctctactaagcacggattcaacaggtccctggtgtcgggttgccagatttggcaaaagaaaagtaagttttacacgggaatactcacactaaaagattagcccttgttgatctgaaatccatatttaactgggcggcctgtagtatttactgtggaaacactatccctaggggcaaatgtttcgcaaggcaaattttgattgccgaagagaccagaaatcctggttttgtgtcatttcttggagcacaagtgagcagttggagatgctgaatctgcaggcgccacagaaaggtgtttggaaggcagagaatgactctttccttattaaaatccactgcaatctatatttccttagatactgtacagctaccttcacaaattaaaagtttctgtatacttaaaatggctttttagtattaaaatcatagaaacacccatggtgggtgagggagaggcagaaatcgaataaagaaaagtcaaccagagatcagggaaaaggaaatcccggaataggttccataggtttttgtgcatccgcagataggcattttaacttttgaaacggcctttgtttttcattagaaccacaatagttctccgagtactccaattaggcggcaaaaagaaataaaacaatttggaggtcactttcaattcaatatgctgatacttttttttcctttttagtgaaaagacgtatgacagggcttggcaaattacacgatctgtttttgtatatacgttttattgacgcagtcatgcccattcatttatacattgtcgatggctgcgttcactctacaacacaaggcagagcagagtagtgcaacaaagagggtttggtccacaaagtctaaaatagatactctctggctctccccaccatacatgtttctatgaaaaaagttggcagactcctgcaatataatgttgaagaagcgattctaaaaataactccacttcatcacatacgtgtatacattttttttcggagttgcaaacaatcagttacttgttttttgacttctaacactttgactcaaggtagtggacatttctaatcttttaatatttattttggtaatttttgatggctatatagtattttgctatgataatgtatagttatatataatcatttattgaactttaatgttggtcattggccttgattgcatttttaaaatttttattttaattttatrtatttacttaccttagagacagggtctcactaccttacccaggctggtcccaaactcctgggctcaagcagttctcccgccgctgtctggcaggtagctggggctacaggcgtgtaccaccatgcctggctaatttttagaattttaggtcctgttgtggttacatatttttgtatctcttaaattattttctgaaaatacatttctaggcatggattactgggtttaaaatgaggcgggaagaggttaccttcatgtctcttgcctcgtattaagattttgttttttaaaaagattgtatcagtttgtatcatcaacagtgaataagtactacagtttgtaccataattttatgaacattgggtatttgctttcaaatttaaaaaatacagtatgtagctttatccatcaggacaccaattatctttgtataaaatgagaacagcatgtctgttggaattgtccagggaaatgagggagaaaaaaaatttactttcacattgtaactttcgtgggccctgggtgcttttgcctttgtagattccttatactataaaaaaattaaaaattaaatttcatgactaccctgatataaagatgaatgcattaaaatgatgtatgaaaatattttcttctamctaaaagtgagtttttttaggtctgaagattgtaaaagacgtaaaaatattttcatgggcccctaaaaagtgttgtgagccctaggcactgtccctgcggtacccaatggaaaagtcagccttatctactattgtgctttttgaggctgggaaaacttaagagttttttgacttataatgggaaagacagcattagtcatgcaaggcctattacaggaaatataattcttaaagtccatcttgtaatttagtgagaaattaggaagctgttttagattttttttcccagaaatattaatttagtcactgagctagatagcctatttaagaaaaagtggaattaaaataaattataatgtgctttctagatgaaataagaattttgctcacttgcttttctctctccacattaaacaccaaacaggtatcctgatgtgcagactygagtgcaggcagaattggatcaggtcrtgkggagggaccrtctgccttgtrtgggtraccagcccaacctgcyctatgtcctggccttcctttatraagccatgmrcttctccagctttgtgcctgtcactattcctcatgccaccactgccaacacctctgtcttgggctaccacattcccaaggacactgtggtttttgtcaaccagtggtctgtgaatcatgacccastgaagtggcctaaccyggagaactttgatcsagstcrattcttggacaaggahggcctcatcarcaaggacctgaccagcagagtgatgattttttcwgtgggcaaaaggyggtgcattggcgaagaactttctaagatgcagctttttctcttcatctccatcctggctcaccagtgcgatttcagggccaacccaaatgrgcctgcgaaaatgaatttcagttatggtctaaccattaaacccaagtcatttaaagtcaatgtcactctcagagagtccatggagctccttgatagtgctgtccaaaatttacaagccaaggaaacttgccaataagaagcaagaggcaagctgaaattttagaaatattcacatcttcggagatgaggagtaaaattcagtttttttccagttcctcttttgtgctgcttctcaattagcgtttaaggtgagsataaatcaactgtccatcaggtgaggtgtgctccatacccagcggttcttcatgagtagtgggctatgcaggagcttctgggagatttttttgagtcaaagacttaaagggcccaatgaattattatatacatactgcatcttggttatttctgaaggtagcattctttggagttaaaatgcacatatagacacatacacccaaacacttacaccaaacwactgaatgaagmagtattttggtaaccaggccatttttggtgggaatccaagattggtctcccatatgcagaaatagacaaaaagtatattaaacaaagtttcagagtatattgttgaagagacagagacaagtaatttcagtgtaaagtgtgtgattgaaggtgataagggaaaagataaagaccagaaattcccttttcaccttttcaggaaaataacttagactctagtatttatgggtggatttatccttttgccttctggtatacttccttacttttaaggataaatcataaagtcagttgctcaaaaagaaatcaatagttgaattagtgagtatagtggggttccatgakttatcatgaattttaaagtatgcattattaaattgtaaaactccaaggtgatgttgtacctcttttgcttgccaaagtacagaatttgaattatcagcaaaraaaaaaaaaaaagccagccaagctttaaattatgtgaccataatgtactgatttcagtaagtctcataggttaaaaaaaaaagtcaccaaatagtgtgaaatatattacttaactgtccgtaagcagtatattagtattatcttgttcaggaaaaggttgaataatatatgccttgtntaatattgaaaattgaaaagtacaactaacgcaaccaagtgtgctaaaaatgagcttgattaaatcaaccacctatttttgacatggaaatgaagcagggtttcttttcttcactcaaattttggcgaatctcaaaattagatcctaagatgtgttcttatttttataacatctttattgaaattctatttataatacagaatcttgttttgaaaataacctaattaatatattaaaattccaaattcatggcatgcttaaattttaactaaattttaaagccattctgattattgagttccagttgaagttagtggaaatctgaacattctcctgtggaaggcagagaaatctaagctgtgtctgcccaatgaataatggaaaatgccatgaattacctggatgttctttttacgaggtgacaagagttggggacagaactcccattacaactgaccaagtttctcttctagatgattttttgaaagttaacattaatgcctgctttttggaaagtcagaatcagaagatagtcttggaagctgtttggaaaagacagtggagatgaggtcagttgtgttttttaagatggcaattactttggtagctgggaaagcataaagctcaaatgaaatgtatgcattcacatttagaaaagtgaattgaagtttcaagttttaaagttcattgcaattaaacttccaaagaaagttctacagtgtcctaagtgctaagtgcttattacattttattaagctttttggaatctttgtaccaaaattttaaaaaagggagtttttgatagttgtgtgtatgtgtgtgtggggtggggggatggtaagagaaaagagagaaacactgaaaagaaggaaagatggttaaacattttcccactcattctgaattaattaatttggagcacaaaattcaaagcatggacatttagaagaaagatgtttggcgtagcagagttaaatctcaaataggctattaaaaaagtctacaacatagcagatctgttttgtggtttggaatattaaaaaacttcatgtaattttattttaaaatttcatagctgtacttcttgaatataaaaaatcatgccagtatttttaaaggcattagagtcaactacacaaagcaggcttgcccagtacatttaaattttttggcacttgccattccaaaatattatgccccaccaaggctgagacagtgaatttgggctgctgtagcctatttttttagattgagaaatgtgtagctgcaaaaataatcatgaaccaatctggatgcctcattatgtcaaccaggtccagatgtgctataatctgtttttacgtatgtaggcccagtcgtcatcagatgcttgcggcaaaaggaaagctgtgtttatatggaagaaagtaaggtgcttggagtttacctggcttwtttaatatgcttataacctagttaaagaaaggaaaagaaaacaaaaaacgaatgaaaataactgaatttggaggctggagtaatcagattactgctttaatcagaaaccctcattgtgtttctaccggagagagaatgtatttgctgacaaccattaaagtcagaagttttactccaggttattgcaataaagtataatgtttattaaatgcttcatttgtatgtcaaagctttgactctataagcaaattgcttttttccaaaacaaaaagatgtctcaggtttgttttgtgaattttctaaaagctttcatgtcccagaacttagcctttacctgtgaagtgttactacagccttaatattttcctagtagatctatattagatcaaatagttgcatagcagtatatgttaatttgtgtgtttttagctgtgacacaactgtgtgattaaaaggtatactttagtagacatttataactcaaggataccttcttatttaatcttttcttatttttgtactttatcatgaatgcttttagtgtgtgcataatagctacagtgcatagttgtagacaaagtacattctggggaaacaacatttatatgtagcctttactgtttgatataccaaattaaaaaaaaattgtatctcattacttatactgggacmccattaccaaaataataaaaatcactttcataatcttgttatgaagttttatgttgtagcaaatayagtctaatgtatcactttatttcaactattactatggattattcaattaaaatattgcactgtaaacattttatttgtccattctacatttcaggccgaggccacatgcttttttttcccgtaggttttcatcaaccaaatttctaatctctatatttttgaatttctaagaaccaacacggaggttacatttcaatcaaacaatcaagccaaatgagaattaatttgcaatgttgaaagattgaatagattgcgactttaagttgctgatcgatttctgcttcatctaaagaatgcagtacacatttttcttcctcagcctcataccagtcctttctctgagtattttcttctttcatttttttaaaggtacatgtgcctcaattagtgcaattaatgtccaataaaataagatgggtacaagtattctgtcatgtactatgtggaaatgttttattgccaatctttttacttggtaaaaatacttgacttcacagggcctaggtcatgactctccaggccttcactgtgccacactcacagatgacagggcttgcggtaccaaaggctctttatcttccagactacagctcctattaatgtgaaaacaggaaaagaagtaaaaattgcacaaaatggcattgaaactttggcgtgggaacctcactttagcagccagaaggtatggctatggagtggtttaagagaatactcactagttttccagatgtatgacagtaggatcttggaaatgtcaggacagttaagaataagtgaaggaaatattttcatgggaaaaatattcctttaaataattataattggggccagtttttgcacaactgtctagcagagttggattctacccaatcaatccaacagagtataagaccggagtacagggtgggaaatgaatgcagctttggacataagtaagacaggcgtggttgttagaaactcacagaggttgtttcttcaacctcaacgccagtctgtttttctgcaccagtgcaacagaagttcactggctgttaactctccgttttttggctcagtgactctcacatgctctctgctctccagtttcagtctattagttataaatctcagaaagtgaaaaggaaagaagaaaaaaattaaatatattcaaatacatttaaaagcaatttttttaacttggaattatggaggaaaataatctagtttacataggtatggacacgctatgggtaacagctcatgcttgtagcacctctgctaagcgacatacaggctttgaggacaaatgctgtgctcttcatgcacacttttcaacatgtgtcagatatggagggaagaaatggaactaaaatatgttgagcacttacaatttttgcatcactatgctaaactctaatgcattattgcctaacagtcttcagagggatgcgataaagtaatgggccaaaattatatatttagaagtattctcatccagattttccctggagatgaactaattcaaagcccattatctttgtaccctagtttgtcccttcccagtgtgcctgtgtttggatttatagggtagtccgtctatttttttaggccataagatcctgggagtttcgcaagcaatttacttcctttgtctaaggcacattccacactacagacaggcagtaactgacattgtgcgggaatcctcaccacactgctctcttctgagaaaagcccctttaaactgttctttaggcaaaaccaaaagccaaacaaacaagcagtcatgctttgtcttataatcctaaaacttctgtcctagaacctgtctggaccaaggttccttgttggagccagggccatccttaggctggtccagtttcctgggacatggcctgtccatctgatagccatgcatcacctaagtgttggtgtatgtggctcatcagaacccttccgtctctcagagcccgtgaacactggccagagggagagagaagaaccaaggcacgaaacaagctttttgatgggaagcttgcctttgcaaacagaatgactggacctaccagaactagttttgaatcatttgaggcccctttaggtgagacaatgttatacagtagaagcctaacagcactgagatccctttgggtcagagctaagagtcattgagcaagcccgaaaaatcagccagcctctttctttttcttttttttttttaaatttattcctatttccttacatttgtttctctctctctcaatggataagtattacaatatgcttaatatgcactttttgtttgcgtgttccagcaaaatttgtattattgttttgaatatatatgttttactttatgtaagtgctgtacatatctcatcctgttgcttaatcttttctcagctccatccctgtgtaattccatagcttatagctgctgcctagtattccatggtacttatccaccacattttttctatccactctcttgggaatagatacctggataacttccaactttgtgagcccctaaatgatgcagcgaggaacagcttggtatgtgtttacttgccctcctatgtaaactttgtaatgcatgccatacgcatgattagaagtgttgggtcagcaagtgagtgcgttatgtaatttaaatattgcatgttctccagaatgccaaatctgtccacactcccatcagctgtgcatgaggggaagctgtacccacttccccaccaacacatggcatgacctctttatttttaaatgaaatatatcctcttgggagagagatgcattacatagatttttttttttttaacgaggaaaaagacatctaccctcatttttcaatacttcccatagtcatatttgtgtttacatcatatctccactattcgatggtatattcattgaaaagcagggactaagtcccaacaattttgttatggaatcatattgtatatacagaagcaagggtgaaaaaaggggagtgagttttgtcgcacctgcttctcagcactgatgatctcttcgccttctccatgactcagttttcaattggtactcttgaagtctaacctgtttctttctttctttttttttttgagatggagtctcgctctgtcacccaggctggagtgccatggtatgatctcactgcaacctccgcctcccaggttcaagtgattctcctgtctcagccccccgagtagctgggactacaggcatacaccaccatgtctggctaatttttgtatttttagtagacacgaggtttcaccatgttggttaggctagtctcaaactcctgatctacccgcctcggactcccaaagtactgggattacaggtgtgaaccaatgcacccggcccctaatctcagtttcttctctttgcttacaaattgagcttattcaaggtttttaggtttctgcttagtcactatgaagaaagcagaaatgccaactcaatggcttccaattttttaaaccatagcctcacagtatgcaatatattttacatgatttagtacatatctctacatgtgattgtgtgtacttcatagatatatatttatgtatgtatatatacacacacacacatacacacacacaaacaggattcactattttctgtgatggaatatatttttaaatttttttcataagaaatgcagcacagtgaaatactactacaaacctatcatagtggctaaatttttaaaaaaatgacaaaactgataacatataccaagtattggggaggatgtgaaactactggaactttcatacattgcttgggaaagtgcaaaatgctacagtatgagaagtgtctgttcatatccttcgcccactttttgatggggttgtttgtttttttcttgtaaatttgtttgagttcattgtagattctggatattagccctttgtcagatgagtaggttgcaaaaattttctcccattctgtaggttgcctgttcactctgatggtagtttcttttgctgtgcagaagctctttagtttaattagatcccatttgtcaattttggcttttgttgccattacttttggtgttttagacatgaagtccttgcccatgcctatgtcctgaatggtattgcctaggttttcttctagggtttttatggttttaggtctaacatttaagtcttcaatccatcttgaattaaaaacacatgaaaaaatgctcatcatcactggccatcagagaaatgcaaatcaaaaccacaatgagataccatctcacaccagttagaatggcgatcattaaaaagtcaggaaacaacaggtgctggagaggatgtggagaaataggaacacttttacactgttggtgggactgtaaactagttcaaccgttgtagaagtcagtgtggcgattcctgagggatctagaactagaaataccatttgacccagcaatcccattactgggtatatacccaaaggattataaatcatgctgctataaagacacatgcacatgtatgtttatagtggcactattcacaatagcaaagacttggaaccaacccaaatgtccaacaacgatagactggattaagaaaatgtggcacatatacaccatggaatactatgcaaccataaaaaatgatgagttcatgtcctttgtagggacatggatgaaactgtaaaccatcattctcagcaaactatggcagggacaaaaaaccaaacaccgcatgttctcactcataggtgggaattgaacaatgagaacacatgcacacaggaaggggaacatcacacactggggactgttgtggggggtgggaaggggggagggatagcatttggagatatacctaatgctaaatgacaagttaatgggtgcagcacaccaacatggtacatgtatacatatgtaacaaacctgcacattgtgcacatgtaccctaaaacttaaagtataataataataaaattwaaaaaaaatgctacagtatgaccccactcctgggtatttatcctagagaaatgaaaacacattcacacaaaagctatacatgaatgtttacagcagctgcattcatcatgacttcaaactgaaaacaacctaaatttccttcaaagggcaattagttatacaaaatctgttacatccacccaatggaatactactcggtaataaaaaagaatgaatcattgatacacacaacaacttgaatgaatctcaagggaattatgttgagtaaaataagtcagcttcaaaaggttacacactgcacaattccattgctacgacagcctctgagagacaaaagtgtcatgatgaagagtagatcattggttgtcgagggttaaaggggagggagagtactacaaaaggatagcctggtggagttttggaaggttttctgattgtgacagtggttacatggatgtatacatgtgttaaaattcacacaactacaccaaaaagtgatgaaaagtgattggaaaaaatgttaaaggggaattggtgcaaatgaacttaagtgaagctgaactgacattggcaggtagcatggcagctgctggcagacaaggaaacgagatggcaacactgaacaaagaaggtcaggcctagagatgtgaacaaggatcatggcctgtgctgaagtccttgcaggagaggtaaagtggtgccagattctcagagcagaacaggaggcagaataccagcctttgggatgagcaacagctggaacctcccagccgaggcaattttaattcaatgtcataagtgttaattgagcacctattagtaggcagacactgtttggggcactgatgatataataatgaacaaggcacccaggccctgacctcatggagctgatattctagtgggatgggtggcaggagagaaaataagatttcagttaattataagtggtatatgtgtgtatgtgtgtatgtgtgtgtgtgtgtgtgtgtactgtgtgtgagggggcactgtttagaatgagtagtcagggaagccttcctgaaggaggcaacaccaaggggtgggcattaaggacaagcttcctcttacatcctctccatgtgaagaaaatacaggcactgagttaccagatagtataattaccttaaaaaaaaaagagggttgcaattcattaaattgatttttatggtcacaaaatcagggcagtctgaagtaaaataatctcagcgcactccacagcagatgacattggcccataatcagcactggcttctggcttggccgatggcactggtgggtccagaccgttccctgccattgactcttgagctcattccaatcatcttccccttggagcactgaagcaaatctgataactcagtgcctgcatttccttcacatggggaggatgtaagaggacacttgtccttaatgcccactccttggtgttgcctccttcaggaaggcttccctgactactcacttgttcctaaagaataaccagagaacaaacaggctcttggaactaacatacttttcaacaatgcctttaaatataatttaaaatggcctgatgattctttaattttatgtgcaccaaaggactccacactgattcttttaagcacttaatggaacttctcctggaa

SEQ ID NO: 8684 - DNA, 202988 bp, Homo sapiens
aaaccttttgccgatctcctgtcctcctgtttgtgtccgctctgtgccctgcatgtatttgtgtgccatcataactataagacggacggaacttaggtgattatatgtctatttccttatcctggaaggtgagctccttgttggagagatgtggggcttatacactgggattctcatctactgccaggtccccagtgattattcaataagtgttttctagaagaaggactgaaggaacagaggagtcctcctaacctgatctcccgctctcagaaatggaacagagtccctaaaaggatcatattgaagagactggactgcattgggggtagccaaggttttcatgcttccaaagggcccctaatatcttttgtaaggaggtgaagcagaccccaagctcataccacccgtcctctttcttccctctagccactctgcaccctggaggtaaacatcagaataaacgatatcataaccgtgggctggctcggtgaactatgagtattctaaaccaagatgtgatcttagatttagtgggaaaaaaacactgcatgtaaagccaaaagattcgggcttgagcctggcctctaggttgtgttacatgtatgacctcaggtggtcgtgggacatctctgagctccggttttatcaacctgggaatgaaaagtattggtcacttacttcctggggttgctctgaggctgagtaaagttagagaatttcttggtacttgtatggtgctgaggaagctccattgtccctttacccagcatccttcatggcaaagagaatgtgcctgctgacacctctttcagcctctgtttcagcctctgcctcagtccttgccagagacgtcaggcttagcacagagcagctgggagccttcagcagagaaggaaggcaccrcttagacatctgcacgggcagtttttaaacatagggaacatgaaggaaataccacagaatttatggagtgaaagctttaaaaagaaacacaagtctgaagtcaaaacagttgactcaattctaggggagatgtctgcctggaagtaggagtgggggaaaaagacttggagtgagtggagacagggtaagcaaagctctgtggggagccctacaaagtggggcaagtgggcacctccccgcatggctcgagacggaaagtcggtcctgcctgtacacagggtagcacttaccagcattttggaaacacacatctttgggcccagctgttccacttttaagaatgtcgcttgagatagcctcatgcaagggcacaataatatatacaaggatgtccactgaagcctcattagaagttgagaaaacttggaaacaactcgaatgctgtttagcagaggataggctaaacaaattacaacacgtctgtacagtggactgaagcagcaaacggcgttatgtctctaaatatgaacaggaaacatattcattatacaataagtgagaaagaccagttgcaggatggcacaggtatgatgatcttgtttccataaaaactaaaaatatacatatgcctgtgcatgcatggaaaaatacaagaggataggaattaatttgtgaccagagtttgtcagtgggagttgggattataggatattttctgtacagttgtgtagagttgattttttcttttctttctttttcttttccttttcttttttttttttttttttgagacagagtcttgccgtatcatccaggctgaagtgcaatggcgtgatcttggctcactgcaccctctgcctcctgggttcaaatgattctcctgcctcagcctccaaagtagctgggattacaggcacctgccatcatgcctggcaaatttttgtatttttagtagagacagggttttgccatgttggtcagctggtcttgaactcctaacctctggtgatccacctgcctcggcctcccaaaatgctgcgattacagacatgagccactgcgcccagcctgagttgatttttttttaatagacatattagtaaaagaaaaatatacagaaaatagtgaaattacgggaaatatggcaactgtctgaccttcatcctagaaaaaccctgatcagtgtccctgtattgcatcacaggtaccaaaattgtaatacatccttcatcatgctactgtcccagtaaaaaccccgagcatctctcatttcttcccttccactccatcctggctaatttactgtccacaattcacagagtattgtctccactctgcgcagccacagaatggrtgtggtaacgtctccatggcatttatggtttctacaaatcacaaatcacatatgaagggctccaagaatattagaggaatgagccagttaactcagcgcccatgggggagctggcaactccccaagaaagctggacatctccaagctggccaccaacattctatagcctctccatgagcagggtgggagctgtgctgggtgcacagtgccatgtccacaggttgatgtgaggggcacgttctaaatcaagtgcctgagaagggcttcggagacctagatcctatccctaaacaactatgggacagtgtaccggtcactttccctttctgggtttctgttttcacctctgtaaaaaagagtaaggcttggtcagtgtttctcaaagcactctccttggaaaactacatctgggatatgttataaatgtccctgaagaggcctttgtggtaaaatacacttgagaaatgcagctctctgcatcgtgctcttggagatttccaatgcatattagcaggttagagtctctgaggtctggcagtaaataaacttacttatcaatgcttataccagcaattctcatgtttatttcaccttggcatcctttaagatattttttttctgagcatcttggttatacatacactgagttaagtgttatccacagtcactgctcgctccctgaatccgtgaccacgatgagtcaccctccatgccaccccctccatgctgccgggccatcatcctgcagtgttcctgtggctgaacatggattatttcaggtgacccctggaaaaaacgaagctctgttttgtgagagagaatgggttagcctctcagtacagatcccgatggaatgggatgaaggagaggtagcctactgaaaaaggagaggggtggggagtctaaaagggcttgaaatgcagccaggagcagccagatggggtggtgcagttgggggacactaagtaggagtgacatggagggacactaataagcagggaactacagaggaataattttcataatacgtctgttaaaaacagggaggcagggcaaatggtcagaaggaaaggaaggttcttggcacctgtgcggttcactatcttatttgtggctgtaactcatctcttcccctggatttaaataccaaatttatgttgatggcttccacgtttgaatataatctttcgaggaagagcatgggctttagagtcatacagcccatgcctcagtttcttcctctgtaacttggggctaaccataagatttacccgctaggtgtgtgtatgaggattaaatgagttgacacataggaaagctcctagaataactagtgtgtagtaagcactcaaatgacatgatcatgatcaattgttattattcatattttcagccatcagtgctctctggctcgacacctccactcagatgtctccagggcatctcaggcttaacaaaactgaatcagaattcttgattttcccaacaatacctcacctttcccagactccctgtttcaatgaatggcacctgatatacctgtagctcaagtttggaacctgagggtcaggtgtggtcctcctttccccttccctttcatatgcaccccaccaggaacttctgcagagcatgaacccacccccaaaatatatttcaagtccatctacttcttcccacctccctctctcctctagccaagcatcccttctctctgggtgaaggcagcagccttctgtgtgccctccctgtcttttctctcactcctttccagggaatctgcacctgtgaccacagccttctgtaacaaatgtacctgtgaccatcctaagacctgtgggggcacagaaaaggaagcccatagctacccctgctggcttttggtgtccatttgcatgaagtgtctttttccacccctttactttaagtttacatgagtccttatgtgtcaggtgagtctcctgaaggcagcagatagttagttggtgagttcttatccattctgcagttctgtatcttttaagtgcagcatttaggccatttacattcagtgttaatattgaaatgtgaggtaccattgcattcatcgggctctttgttgcctgtgtacttctttgtttgttttttgcttttgttttttaacttgtatttttgttttataggtcctgtgtgatttatgctttaaagaggttctgttttgatgtgtttccaggatttgtttcaagatttagaactccttttaccagttcttgtagtggtggcttggtaatgacgaattctctcaggatttgtttgtctgaaaatgactgtatctttccttcatatatggtgcttagtttcactggatacaaaattcttggctgataattggtttgttgaggagccggaagacagggccccaatcccttccagcttgtaggttttctgctgagaaatctgctgttcatctgattggttttcctttacaggttacctggttcttctgtctcacagctcttaagattctttcctttgtctcaactctggataacctgatgacaatgtgctgaggcaaagatctttttacaatgaatttcccatgtgttctttgtacttcttgtatttggatgtctaggtctctagatggctgcagaagttttccttgattcttcccccaaatatgttttccaagcttttagaattctcttcttcctcaggaacaccaattattcttaggtttggtcatttaacataatcccagacttcttggaggctttgttcatattttcttattcttttttctttgtctttgttgaattgggttaatttgaagaccttgtctttgagctctgattttctttcttctacttgttcaattctattgctgagactttccagagcatttcacatttctaaaagtgtgtccaaagtttcctgaattttcaattattttttctttaagctatttcattgaatatttctcccattcaatattgggggattgtgttgggagaggagggtctccctttcccacttcygcaaatggggcactcacagtatttggagtgtcttctgggtcctgcaggagcagtctggttccttcagagagtctgtgggtccttttgggattgctggttttttcttgcagttgatctggagctaaaattcaccatggaagcctccagatgctgctctgtctgaagctgcaatctagtcctgccacccagccactatgatcccctccatctctctgtccactttagtcagataagctcaaagctagaacaaaggacccatatatgagcctacggatctgccttcaaacacttgagaagccctccaactcaccatgagaacactgaccccaatcgggatctttgctttgctccaacagccagacactcagacaggtcctcagacccagcaactaatggacttggtgggatggttgtcctcaaagcagccagcattttgatcaggctggcgtctggtcctgtatttttctgggatattcagaatctcttgacatgtatcttcacttaattgtgaatttaaaaaattatagatggatgtagatatagatatagatatagacatagagatagatatagatagacattttggagaagagtctctctttgaagacttcctctcagagtacaagtccgtggttacaaccattttgtttctcagcaaacatggggaagtttgcttttcttctctgaggaagttaatataaatgtttattgacagtgcagtcatcaaggaataaagttgctgattcattcctttacactgaaaccctttgttgtgccctcctcttccttcctctttatagggagacactctgagaaagagcacattgtgggggcccactccatgtgatgtttgcttggttgcctgttcccttttctacctgcagagcacggttcccataagggcggcgagatcagcctcctgtctcatctggaagaccaccactctggggtctcagaggaatgatggaagccttggggtttctaaaattggaagtgaatggccccatggtgayggtggccctgtcagtggctctcttggccctcctgaaatggtaagtgcagccagccctagggactgtgacagcgtcagcyrtctcaccctggagccttgctggtgccatggcggggtatgtgggagtgtgtttttcttcttttctaatctagcgggagtgagtattaacacagcttcagaattaaaagcaaacagccaggttaatcttttgctaaaatgcatgagattgaagtgtcaggaaaggctggtgattcagtgactgagaacgctacacataattaagtttgaaagagatggaaaaagaaacaaattggaaaggcattaggtttgggtagaagcatttccttgaaccccgtcatatctcctcacctcatttttctaaaatcctctgtccttgttggatttacagtgaattcagcctcttggttcatattacattcaaaacaaaacaagacgtaggagctgtttggcaaatgtgggcctctttgcaggaagtcattgagggggatttctgtagggttaaggacaaagtggtagatctaatttctcatagttgatagagggagatggattctgatgaacatagtgtgtgcagctcctacaaaatttgagaccctgaaaggatctcaaacttgaactccgagttgctcccctgtggttttgttaattcaacagcaaattttcctaagsctgactctggtgtctgtaggtcgaaggcctcataatatgctacatttatgcatattcgccctgtcagttaaacttattagagttacccattcaatcaaaagcacctggatttagatggctctggcttttgagggcaaagtgagtggaaaaaataatggagractggagtccgaacagaattttaatttatgttttcagtagtaataaagccttctctagattaataactgggaaagcactttgaaaagcatcaagcattatgcaaatgtgaggtattattcttttggaatttgcatagctgagagtggaattcacgtttgatgttctatgatgatgaaattacttcttggaaattggctctgaaacccagcctcagtcccagtgctgtttttctttttaactggtttaattttttttttgaacttttttatctcattgtagcttaccttggattgaaactggccacatgtaaaaccaagagcaaatggtagctccttccctacccccagcccccaataatccatctcaatgtgtttttatgctccgggaagcccgaagcacagtgtctgacatgcagaaagtgcttagtcgatgtcagccactataattaaccatctatcatctatgtaacctaaaagaaaataagtctttagtggtttaggtttatttttaatttcttactaatgtgcttattcatattaatctcatcaatagctatgctctgactgtggttctcaaagcggacacttttttacacttttgtttcagtctttgttgtgtctgagcctccagctcagtgcctgccatgtaggaacaccacaccattcagcagggcagctatgtgtttgctgtctattcttgggccatattaataacctggttcaaagatgcagrgattaagataaatgtaccaagcagaagtggtaaacaggaagtgagagctgacttctatttgttattgcaaaaatatttattaacctgttaatgtgtgcccagtctggaggaggccctggtacaaggtcaggaagcaggagatctggagaaggtgcccaaggcaggggagacacagaggttctgggggtgagctggatgtctagagaggatactgcaggaggagcagaggcagcaggagagaggtcacggccctggctctggtgcttttgggtccatcccttgattcagtgcaaggggaaccacccttgggctttcaacccttctgttccgggtgagactctagtcagccactaagcaacagccaccagcttgaatgaggcaaggcccccttcctgcttcattgtcttgaaaggatatgtgtggaagagacaggggtgcttttcctccagtgagaggattcacaggcaaggaaagatggaggtgtagagacacttgcaggagaaactggcagggggagtggattaaacattgcagcacattagtctttgctttaagtgttacatgtgccatccagccaggtgagatggcagcagagaacctaaaccctgagaaggtgaaatcaaatgggctgggcgcggtggctcatgcctrtaatcccagcactttgggaggccaaggcagacagatcacttgaggtcagaagttcgagaccagcctggccaacatggtgaaactccatctctactaaaaatacaaaaattagctgggcatggcagcaggtgtctgtaatcccagctacttgggaggctgaggcaggagaatcgcttcaacctgggaggcacaggctgcagtgatctgagatcatgccacttccctccagcctgggtgacaaagaaagactctgtttcaaacaaaacaaaacaaaacaaaacagaaggatgggaggatggagggaatcatggtggacaggaggcaggactagactgcagctccagacaaagcagcatctggaagcttccatggtgaattttagctccagatcaactgcaagaataaatcagcaattctgaggggacccacagaccctctgaaggaagcggattgctcctgtagggcccagaagacaccccaaatactgtgagtgccccaactgcggaagtgggaaagggagaccctcctctcccaacacactcccccaatttgagtgggagaaatattcaatgaaatagatagcttaaagaaaaaacaatagaaaattcaggaaactttggacacacttttagaaatgtgaaatgctctggaaagtctcagcaatagaacaagtagaagaaggaaattcagagctcaaagacaaggtctttgaattaactgaatcyaacaaagacaaagaaaaaaaataaaaaaatatgaacaaagcctccaagaagtctgggattatgttaaatgaccaaacctaagaataattggtgttcctgaggaagaagagaattctaaaagcttgcaaaacatatttgggggaataatcaaggaaaagttccccagtctagctagagacctagacatccaaatacaagaagcacaaagaacacgtgggaaattcatcgcaaaaagatctttgcctaggcacattgtcatcaggttatccagagttgagacaaaggaaagaatcttaagagttgtgagacagaagaaccaggtaacctataaaggaaaacctatcagatgaactgaagatttctcagctgaaaccctacaagctagaagggattggggccctgtcttccagcttctcaaacaaatcaattatcagccaagaatgttgtatccagtgaaactaagcatcatgtatgaaggaaagatacagtcgttttcagacaaacaaatgctgagagaattgccattactaggccaccactacaagaactggtaaaaggagctccaaatcttgaaacaaatcctggaaacacatcaaaacagaacctctttaaagcataaatcacacaggacccataaaacaaaaatacgagctaaaaagcaaaagcaaaaaacaacaacaacaaaaaaaaccaaagtacagaggcaacaaagagcccaatgaatgcaatggtacctcacatttcaatactaacactgaatgtaaatggcctaaatgctccacttaaaagatacagaactgcagaatggataagaactcaccaaccaactatctgctgccttcaggagactcacctaacacataaggactcacataaacttaaaggggtagaaaaaggcatttcatgcaaatggacaccaaaagcgagtagagcaacggtagctattctcatatcagacaaaacaaatcgtaaagcaacagcagttaaaagagacaaagaggggccgggcgtggtggctcatgcctgtaatctcagcactttggatcacaaggtcaggagttcgtgaccagtgtggccaacacagtgaaaccccgtctctactaaaaatacaaaaaaaaaaaaaaaaaaaaaaaaaattagaggggtgtggtggtaggtgcctgtagtcccagctacttgggaggctgaggcaggcgaatcacttaaatctgggaggtggaggttgcagtgagctgagattgcaccactgcactctagcctgtgtgacacagcaagactctttctcaaaaaaataaaaaaaagagagagacaaagagggacattatagaatggtaaaaggccttgtccaacagtaaaatatcacagtcttaaacatatatgcacctaaaactggagcttccaaatttacaaaacaattaaaataggcctaagaaatgtggtagacagcaacacaataatagtggcagatttcaatattccaccgacagcaccagacaggttagcaagacagaaagtcagcaaagaaacaatggatttaaactataccttggaacaaatggacctaacagatatatacagaacatttcatccaataaccgcagaatacacattctattcaacatcatatggaactttctccaagatcgaccatatgataggccataaaacaagcctcwataaatttaagaaaattgaaattgtatcaagcactctctcagaccacaacagaataaaactggaaatcatctccaaaaggaactttcaaaaccatgcaaacacatggaaattgttaaataacctgcttctgaatgagcattgggtaaaaaacaaaatcaagatggaaattaaaaaattcttctaactgaatgacaataatgacaaaacctatcaaaacctctgggatatagctaaggcagtgctaagaggaaagttcatagccctaaacacctacatcaaaaagtctgaaagagcacaaacggacaatctaaggtcacacctcaaggaactagagaaatagaaacaaactgaacccaaacccagtagaagaaaggaaataaccaagatcagagcagaactaaatgaaattgaaacacatacacacacacaaaataaaagataaattaaacaaaaaactggttctttgaaaagataaataaaattgatagaccattagcaagattaaccaagaaaggaagagagaaaacccaaataacgtcactgagaaatgcaacaggaggtattacaactgacaccactaaaatacaaaagatcattcaaggctactatgaacacctttacgcacataaactaaaaaacctagttgagatggataaattcctggaaaaatacaatcctcctagcttaaatcaggaagcattagataccctgaacagaccaatacaagcagtgagattgaaatggtaattaaaaaattaccaacaaaaaaaagtccaggaccataaggattcacagcagaatttaccagacattcaaagaagaattggtaccaatacttttgacactattccacaagacagagaaagaaggaaccctccctaactcattctatgaagccagtatcaccccaataccaaaactaggaaaggacacaaccaaaaaagaaaactacagaccaatatccttgatgaacatagatactaaaattctttttttttttttttttctgagacagagtcttgctctgtcgcccaggctggagtgcagtggcgcgatctcggctcactgcaagctctgcctcccgggttcatgccattctcctgcctcagcctccggagtagctggcactacaggygcccgccaccacgctggctaattttttgtattttttttagtagagatggggtttcaccatgttagccaggattatcttgatctcctgacctcgtggtccacccacctcggcctcccaaagtgctgggatttcaggcgtgagccaacacgcctggccaatactaaaattcttaatgaaatactagctaaccaaatccaacaacatatcaaaaagataatccaccatgatcaagttggtttcataacagagatgaagggatggtttaacatacaaaagtcaataaatgtgatacgccacataaacaaaattaaaagcaaaaatcatgtgataatagatgcagaaaaagcatttgacaaaatctggcatccctttatgattaaaattcttagcaaagtcagcatacaagggacataccttaatgtaataaaagccatctatcacaaacccacagccaacctaatactgaatggggaaaagttgaaagcattccctctgagaattggaacaagacaaggatgtccactctcaccactcctcttcaacatagtactggaagtcctagccagagcaatcagacaagagaaagaaataaagggcatctgaattgctaaagaggaagtcaaactgtcactgtttgctgacaatacaatcgtttaccttgaaaaccctcaggcctcctccagaaagctcctagaactgataaaagaattcagtagtttccagatgcaagattaacatccacacatcagtagctctcctatacaccaacagtgaccaagcagagaatcaaatcaagaagtcaaccccttttacaatagctgcaaaaataaataaataaataaataaataaataaataaataaataaataaataaaatacttaggaacatacctaaccaaagagttgaaaagcctctacagggaaaactacaaaatgctgctgaaagaaatcatagatgacacaaacaaatggaaacacattccatgttcatggatgagtagaatcagtattgtgaaaatgatcatactgccaaaagcaatctacaaattcaatgcagtctgcatcaaaataccaccatcattcttcacagaattagaaaaaacaattctaaaattcatacagaactgaaaaagagcctgcatagctaaagcaagactaagcaaaaagaacaaatctggaggcctcacattaccttatttcaaactatactataagcccatcatcacccaaacagcatggtactggtataaaaataggcacatagaccaatggaaccaaatagagaaccacaaataaacccaaatacttagtcaactgatcttcaacaaagcaaacaaaaacataaagtgaggaaaggacacctttatcaacaaatggtactgggataattggctagccacatgtaggagaatgaaactggattctcatttctcactttattcaaaaatcaacccaagatgagttaaagacttaaacctaagacctgaaactatacaaattctaggtataacactgtaacaacccttctagacattggcttaggcaaggatttcatgaccaaaaacccgaaagcaaatgcaataaaaacaaagataaagagccgggacctaattaaactaaagagcttctgcatagcaaaaggaacagtcagcagagtaaacagacaacccagagtgggaagaaatcttcacaatctatacatctgaccaaggactcacattcagactctacaatgaactcaaacaaatcagtaagaaaaaaacaatcccatcaaaaagtgggctaagaacatgaatagacagttctcaaaagaagatatataaatgaccaacaaacatgaaaaaatgctcaacaacactaacgaccagggaaatgcaaatcaaaaccacaatgcaataccacattacttctgcaagaatggccataatcaaaaaataagaaaacagtagatgttggcgaggatgtggtgatcagggaacacttccaccctgctgrtggggatgtaaactagtacagccactatggaaaacagtgtagggattccctaaagaaccaaaagtagaactacctaccatttgatccagcaattccgctactgggtatctacccaaaggaaaagaagtctttatttgaaaaagatacttgaatatgcatgttcatagcagcacaatccacaattgcaaaatcatggaaccaacccaaatgcccatcaatcaacaagtggataaagaaactgtggtatatgtatatgatggaatactatgcagccataaaaaggaacgacttaacagcatttgcagtgacctggatgagattggagactattattctaagtgaaataactcaggaatggaaaaccaaacaccgtatgttctcactgatacgtgggatctaagctatgaggatccaaaggcataagaatgatacaatggactttggggacttggagggaagtatgagaggtaggcaagggataaaagattgcaaatatggtgcagtgtgtactatttgggtgatgggtgcaccaaaatctcagaaatcaccactaaagaacttactcatgtaaccaaatgccacctgtgccccaacaacttatggaaaaataaaaaaacaaaaacaaaacaaaacaaaaaagcaaaaggcacaccaaggttgcttcttgtgctctcaaccagcctgtgagttctctaagggtgagggccaggtctcctatctcattacagttctggaatcttctgccaatggcagggatgctctgctagcatgtggttgaaggtggtaaagtcaagaagtccacaaccatcagccccgccccaggactcactgtgggtctcctgctccttcagcgggccccctgtcrctctctcccccacaaaccctaaggcctcctccagaaagctcctagaactgataaaagaattcagcagtttcttttatcctgggctggggtcagagcgacgctgtctgggtgctgtgaatggtcctttgttgctgcatgaggcctcctctttccttcaactccaagctcaggggtgcttcctcagggaagtgttttctgtttccaaaggcactgaggagccccctctcagcattgcttttatcccatctctgtccctcacaatgcctggcacatagttggtgcctaacaaatgctgactgaaggctaattccaacctctaagctctgcctggtgctttcttcctgtggttcttctcttggccttcacagttccatacagatctaaattctcttgcccatgtgacccactccctttcctgaaagcttgctgtgttttcagtttgtgtcaatttgccatgcactgttccagttgttgaagatggactgtttttgtatcctttcttatcctgtagagcagacaccatgccatgtacttaatgcacacttattaattattaggtgtatgcgtgaatttggaaaaaagacaaaaaaaatctttcatttaaaaagacactgttttaaactaggcacagtacactttgatcgttttcccraaaccgcgttggacaccatttttccatgatgatcatttgatttaaaccgaccagtgtgtggctgagctctgtgaactggggcatcaggggatcagggctgcaccaccagggctggagatggagctggggatagagactgtattagctggaagtacatggagcacatgctaagacgattaacacacaagataacacattttaaaaactaattttttcccatataaaatggtttaaaattcttacttctggaggagatttgatggacaagaaatgagttgtacgagttgaacgttgctcgaggcaaccgtaagtcctagcgtatttaatctttcaagcaacacctaaggactggcagctgggttcctgtggggaggataaagattgctttattctttaagatccagtgtaaagaaatagcccagatagcaatagtggatttctttctgggatggggttgtgggtgatttcttttcccttcttttagtctttctgcatcttttgtatttctttaatgagtgtgaatatttagcaaaaaagagaaattttactaaaaagagtgggaaactgctcccttctagtggtraaggggaaagcagtttcatgctttaggcgtgaggtttcaggactgtagtctaattatttcttccagtggagtagaatgtctgaaaggatttggagtaacagggctgatgaagyggcaaggaaggtgagtagctatctaggcaagtatgtgaacacagcctggaagggcttgtagtaccaagctgctcttaaagctcaggtaccaagacccagaggtacataatcaattcgacatcaaaaataggaattcaggctgggtgtggtggcttatgcccaaaatcccagggctttgggagggcaaagtgggaggatcacttgagcccaggagtttgagaccagcctgggcaacaaagagagwccctgcttctaccaaaaaaaaaaaaaaaaaamcaaatcaaaaattagccaggtgtggtggtgcgagtctgtaatctcagctacttgggaggctgaggtcggaggatctcttgagcccaggaggttgaggatacaatgagctgtgattgcaccactacactcgcactccagcctgggtgacagggcaagatcctgtctgtagtcccagctacttgggaggctgaggcaggagaatcacttgaacccgggaggcagaggttgcaatgagccgagatcacaccactgcactccagcctgggcaacaagagtgaaactctgtctcaaaaaaaaaaaaaaaaaagagatttcagatagagagtgagttagtgttctgatcaagtctcattctaagaccagtttaaattgaaatgtgattggtgattattaagatttaagactatcacagattattaagacttaagtttaccactatgcstggaagttcctttcccagagagtttcttctacatgtaagaactggactctaattctagacccacatctactccagactatatttagaaggcaccattgggatggaatatgggagccaagatgagaaatctgaagaggaagaagccatgtaggtattccctggcacaatgggaggtgagctccggaaaaggcatcccgcctccagcatgtggggactgaagatcaatttgcccaccatttcccaacttcggttcctaaaagtgtttaggaaattaagtctaaatcaagcccttcttggagattcatagaatatcaaaggccctgaaaggttctttaataaagaaacctgttcagcttyatttaacccagtgttttcgcagcgtctttgctaaagtactgctgcatatggccgtggtgggttgggcaactagacccgctgagatggtcccttgaaaacggcggtcggatgcattggtagctgcacaaccagtggaaatggaggggccacaaaacggaggaataagacattcaaattgcccctttgcaagctctgaggttccagggttgacgtattgtttccttcagggcacagaaaatatggagtctagcgaacagaagcagggcccatgcgtaggggtggtccaggtttacaccaaagaaaatgartactactcacagctgtctggcaaggtggcaagagagcgcctcggaggtcgtgagtgtccctcaccatccataggaatgccacaaaagcccttgctgccaggcatgagcagctggtacagaaggccaccgagtgccttcccgatctggactccgtgacttctatgcccactggcgctcttgcatgggtcagtctgtgctgccgctcaggaaaagcaagtcaggtgccataccagcgacccaatggcggctgctgcttcttctgcctgggcacctcatcatccccagcagtagttcctaggtgtgagcgtggcaaggagcccagaaatacagaagsagcgtttaggggcctcacggtagcttcatgcctgactcttttctctcctcttccggcctggcctctaggcctttctggatcgccagccagtcagactctacttcgagaagcagaaggtcttgggctgggtcttgaaatgcagggaagaattgacttggcagaggagaggaaagagaaaatttcaggtggggaagtaccccaggcaaagacaacattagtgtttgtaacatttgctggaacaaaacattaggagtgtgaataatggacacagtttagaaatacattttaaaggcatggataattttcagtgcctccaagcatctagagagggatacatctatttcccttttttttttttttatctttttgtatttttgtctaggatatgatgggtacttcgatttaataactcagtgatgagcttggagataaaattgagcctgctgtgaaaactaggtctgtggcttccttgaggaccatttctacagaatattattttttttgttttctctctcttaaatggttatacacaatatccctatccttctcctcactttattgattttccagaatgagagtacgaggtatgactataaagtaacgtgactgaytattttagcatacactccaatacttatacagccaaatgaattttatgaccttcggaggcattttcctgataggctaaacccttactgcagatatgccactatcagaaaacacattcttagcactttttgtgggaatggcacttggtgcttagatgtggtcctttgaaagccctcaacgcaacacatctttgtggagaatagattgattttttttaaaaaacagtccatattttggcaaatagatgattaaacagagtaatattatttgcaattttaaaaatgtgattataaaacaatacacagcttgcagaagaggtgtatgaaccagttctggaagcctgggaattttgctgaggggccacgctcactggcatacgagttggtttttggttttggttttgttttttaaagaaaacaatagcaacagtcttaatatttatggtcataccttctctcgtctagtaaggaattcaggcttctggtagcatctgttttgggggcagagatgaaagaagaatcttatttgttgtataaacaaagcaaaacatcagattgatgtgtgtccattactgagctgcgtgagtgggtgctcagcgatgccttcccgggaaggaagtgactctcccasaaataaaatgattgaatgaactcttcccctaaccctagtgccataataacaacaaacctaacaactatcgcttgccactgaagggaagtacgckgtctatgggaaccctggtagccttatatggacttgttttttggttgccggaataacatgcatctggacatgggaatgagactggcgagaaagggagggggcagatgttcacactggtattcattggtgcttcaattactaagagccacatctttcctggtttaccagaaataggtgctgttgcacaacttcctggtggatagggtaggggggtgttagctgataggggagttccctggagccctcgrctctctctgttgctttcagcctcagccctcagtgcagagtttggccctggcccgcgctgtggggccctcctaaacctcccctatgtccttgcaaaggtgtgcttcttaggtttcgcttgagcagtcagccagttcctcaacacaatctcagaaagaggccggccccttttttcccctcgaagatatctagaaaaaactgtgtcagagatgatctgaaagcaaagccaagctctaccaatagtggcttccaccaatgccttgtttccctgagcactgcacacagaccccctgggagagccagcgccataccccgaaaccagcagctgcctccacattctgatctgaaaggtgccctaaagtcctcgcatgtgcttccctccttcctgcactgacatgcctgttccctccaagctgcacagcgcagtccctgttgcctgaatgctctcccttcttggtttaactgaactcctgcctaaccttcaaaatcttgtctaaatgtcactcttccataaaggtctcctccatcaggccagccctcaaccagccctgcctcctgtggacttgcttcctatctctctggctatctcggcacttactactttactttatttatttatttatttatttatttatttatttatttatttagagatggagtctcactctgtcatccaggctggagtgcagtggcatagtctcagctcactgcaacctccgcctcccgggttcaagtgattctcctgcctcagcctcctgagtagctggggctacaggtgcgtgccaccayacccagctaatttttgtatctttagtagaggtggggtttcatcatgttggccagtctggtctcgaactcctgacctcaggtgatccgcccacctcggcctcacaaagtgctgggattacaggcatgagccacagygcccggcccactttattttatagcttatgcatgtgacctatcttcttggcttgactgtaagtccctaagaggagggcccacatcttaagccagtgagtgccctctacatagtagctgctcagtaaatgctaatgatcatgattatgcctctggtaaccgagatagcagcactgtttccaaatgattactgtgacaatgtgtgtgtgtgtgtgcatgcctgtgtatggaagagggtagaatcagtctccccctaattgcacactagtggtagtgtgttcttagcacctggcagaatgccttgcacaaggcttattgaaaagggaaataaatcttgattcatgcaatcgtcgaatgctgaaggttttctaggctgtgagctggttctacctcattggtgtgctatggataacattcccatgaattcagatagatagaggaattgccccatttgaaattgaagagcaagactgyaaaaggaggggatgatggaatgcaggacccagccacttagaatacgtggtacatgggggtatatagagcactcaaagtctgagtggggtatcctgacaccagactaggggacaggaggcatccaacccccagcagaggcattgaagaacagacactttctccttcactgttctattgagcacaaatccccacagtttgaagcaatggtatctcaactcttccctaccatccactgttgatgtgatttttccccatagatcctatgttctgttgtcccagcaacaatgtatatttaagtaatgattgattaattttcccattttaattattcaaaggcaagctaattggaaaactctgccagttgagaatagctgatcaatgagataaccagcattagtgtaccaaattataattccactccaaagcaaagaaactcgacattttccttaacctgcaccaccatcgcgttgtcaataaatgcacgatttacattaggctctttgaaatattgaaaatatctcatgtaccctcttcctaccttcacaaatcagtaggcacctgggaaccccaggctgtaaagcagtgaagagggagtgtagtcagttgtacatttaaggattttaactccatccgtacacagagagtgascaaaattggtagcatcatctcatgatctaagagcgtacctaaggagataattgggaggttctcaggagaagtgtggcattgtggaaatcagccaggcctttacagtgtagggacagacacacctctttccctgggtgtccttgggccagccactccctccttgctcatttcctcattggtgagagagggctgggacacctgcctctcagcattggcacattttcccccagccccccaggctatgctgggaatcagcctcacatctttcttggctctcaccctaatgttaaccctccacagtctggccagtcttgactcccaagtgttcctctctctatctgctttgcttctgctgcagttgaggacttcaaaatcactccttggctggaaatagccttcccacgggtctccctgccttctatcttgtgctcccctaatttgtcctgcaactgcagccaccggctcactgctcctctgcataaaaccctttcctggtcctcctgtctaaggaagtgagtgttcctggcctggctcctgaagccccctctgacctggtcccctgcccctctgcaggtttaactcccctcgcttctcacctggtgcctggctcccaggtgctcacagctcctcccacacaccatgcagttcagtgccaatttctttccttctacttgcatgtccttcccccttcatttgggtgagaacttctccaggagcctcttctgcatctcctaggttcttgccccaatgtacctggtaccttccctctctctcatcacttacctggctccccaagggcaggattggtccttcctcakctttagctgagcactcagcattgtgccaggggcactcaacacacttctgttgagtaataggcacgcagttacttgttgaaccaaactgcgttagaagagatgatctataggattttgtgtggcatatgcattgttctttgccgctatgggtatcatcatagagaatttccattaatttctggccgtgtgccactgcaaccagctttcaccctgacttgtcatataacaaaatatcattaaattgaactctagttttttttttttttttttkagacagggtcttactctgttgcccaggctggagtacagtggcacaatcacagctcactgcagcctcaacctccccaggctcggggaattctcccaccccagccccatgagtagctgggastacaagcgagcactaccaccccaggctattttttgtatttttttgtagagacggggtttctccatgttgcccaggctgggaactctggatcttaataaaatatttttttctttagaagtcaggctaggctgggctgtgggttgaagttcatctctgtgctatttatgaaggaagggattgctaaccaaaatcattgtgcaaaggtgacagctcaaccaatttaggaaaataaactactcccgagcacttcggcagcttgctagtttatcaacgatcccttgaaaacgcactaaaaacacttcactctttctgcctttccacactttctataatggcccagggcttaggctttggaatcagatctcctggattcaaactctggctagccttgtgaccttaagcaatagatgtcaggtctccgtgtctcagtttccccatgtgtaaaatagggatactaatagtacctacctcttagcatgttgggaggattacatgagtaagaacataaggtggacttagagcagtgcatggcacagctcagggtcaataaacattagctcttagtgttatctgataactgcacgcttatattcaacaaaaactgcatagacgctgggcagctagatcttggtttttattttgtttatctagttattttgtaaacctcattctgaattctcacctgatccccaggaatgcactgcagtgaaaagtgaggagaggcgtacttcaaacaagtgacctcattttgaataatcctggacttataccactaggtagcttttgaccttgaacaagtaaaattaggttttaaaaatgcgtatcagacttagtaagctgaagtgtcttcgggggtgttggggatggtcaccaatggtgtggtggggacagagccatagtgcggcaggtttagaaatgatggggaaggagggcagatgaaaagaagactgtgggcttttctttgaagaaggtcagagatgtcagccacctctctgggcttgatcacttttccatacggtcaagcggagatagtcattctctccctgtctccttgaaagggagtatgagggtttgtgagcaataamccttacaccaacatatattgctattagtcyattgatggcatctgtttacctctcagttgtaggtgcttcaaaattaaagaaaatctatttcttgaaaagtgcacaataaatcaagctttaaactcaatttgttttccagaaatttttcaaattttcccatgacaaaatttacatttattttctgattttaacagtaagagtaccattctaattttcatckggtctttgcttcattggttgacatttgccttgcccttggacttgagaacttgaagtatcaatgaggcatagcacatcagtaaataagccccgctaagccatactctattctcgcctgttgaccagatcttttgtttcctgctcactctcatccaagcccttacccacatcattttcaatgatggtgtcactgcaaatgtttctttgcaggttcaattctctcctatcataaaacaaacaactgagccagccaactaaccaaccaaccaaccaaccaaccaatcaaccaaccaactcactaaccrcctcttctttgactccaccccaggcaccactccacttatccttctcttcccagcctagtgacttgaaagaggactttgtatttgctcactttctcacctcctatttacccccgacccctgcaataaggtctctgttccattctctactgaaacggctttcttcaaggccaccattaagtctctagtacctaaactgaattaacagtttctaatccttctctttctttggcactttgcaatatttgttgtttgtttgtttgtttgttttgaaataggatcttgctctgtcacccatgctgaagtgcagtggtgcaatcatagctcactgcagcctcaaacttctgacctcaagtgatcctttcacctcagcctctcaagtagctagaactatagacatgtgccaccatgcccagttaatttttaaattttttgtagagtgaggtcttgctatatttcccaggctggtctcaagctcttggcctcaagtgaccctcctacctcagcctcccaagtagctgggactataggtgcatgcaaccatccctggctaattttatgttttacttatttatttatttatttatttatttatttgtaaagacaggattttgctatgttgcccaggctggtcttaaacgcctgagstcaaatgatcctcccacctcggccttccaaagtactgggattacaggcatgagccaccatgcctggccgctttgcaacatttgattctgttaattttgggtatatgtcaaagctgtcagtyacgtaggggtagaaaaaaagttgtgcatcattgattataatgccagggccccattttacagatgtgaatatggaggtccagagaagttatgtgatctgatgtgtattagtcagctactgttgcaataatgctgtgtaacaaaccaccccaagctcattggcaaatgacaatgtttatttttctcatggtctgtatgttcactggagtagctctgttccagtctgacagtggggtttagatctgctccacatgtttgtaatgggacccaggctgaagagaatattagggaagtgctgctcctgacaggtcacagggatgcaagaaatgtaaaatgaaacagtaatatctcttgaggcctcaacctggaagctgctaagataatttctgcccacattctattggctaagcaatccacatgcccaaggttaacattaatggggcagggaagaagactctgtccactgtagygggaggcactgcacagtcatggagcaaggggcattgatgtagaattttgatacagatggggcatgaagcatcaggagcagtgattcactctacctcatgctccaagattacacagctggattctgatctttggcaaaatagaatctaggggccacaagtcacaagacaaaataaaaccataacaaaaaaataaataaatgaacaaaaacttaacgtgaatggacatattaacttttattgtaagtgaaaacagtgactctctgggggaaaaaaaacaacaggccaggcatgatggcttacacctataattcttttgggaggctcactttgggaggctgaggtaggaggatcacttgagcacaggawttctcgagaccagcctgggcaatataggaagtctccgtctctacagaaaatacaacaattagccaggtgcggtgacatgcatctgtggtcccagctactcaagaggctggggtgagaggatcagttgagcccaggatgtggatgttgtagtgagccaagatcgcaccactgcacttccaacagcaaagaccctgttcccccmaaaaaaacacaaaaaacaaaaaacaacaaaaaaaaaacaacccaccaaaaaacagaaacaacagatagtgatgcagaattttcccactgagacactgacatggtgggtcatggtgatcttgcttatgaagtgataacctagcttcaagagtgttgaagcagggtccagagctcagtgtaggggccaggttggtcctgggccgaacctggggaygtacctaggaatttctagccaaataagcaatagagggaagggtctgactgatgacggagcatgagcacactctagraagggcaaagaattgatctgggggatgggatggggcggggccctaagatttcaactccaccctggaaaagcaggacttaggggaggcatgtctgaagttcagaagaccaggggaaacctgaatgcagaaagcgcagcttgttcaccatgtcctgaaatacagcaaccaggggacactcttgtagattgtgagctgtattgcttaggacaaattcattgttctatgctgggcagtaaatttatggatgttgttatgccaagaaaggaatatggctgaaaacataaattgctccagaattgttttaaatattctcatgggtgctggaagtcctctgggttattaaggaaaaaatttgtttatttcttgcccttccggaaaccaccctttggtgctggctagtggctgtcagaagaaagggtgtatccatgtatcacaagggctattacacatcgtgaatttaacttgagttctcaaagataaaaagagacacttgtcttgcctccacgctccttctcgtcctgcacatttgtccactcacctccagtaagttgctctggaatctgaacagggaggtttcttgcaatccagaatcagccacaaaatcccatttccttttttcctataaaaaagatgtgctgactgaaacaactaaaatatagactagttagtgtaataacaataagtagcaaaaacaaaatagaaaaacaaagcacaacatgaaaaaagaagtttttgaattagtgtcttctttcatcaaggtcagtttctctccatctcacatcctctgtgaccctagggtggtgtggaagatccttccccacccacacccacacatggggtattatttgggccttttccagggacttctgtcagttctgatggtctttgcactgggctgagtagtgtcccctcgcccccaaattcatgtccattaaaacctctgaatgtgacctgatttggaaatagggtctttacagcggtaatcaagttaagatgaggtcctactggatgacggtggtccctaatccagtgactggcatccttataagaagagtgaaatttggatgctgagatggacagagggaggacgacatgtagatatagtcacacaggcgagaacactgtgatgaccaaggcggagattagagggatgcatctacaagccaaagaccatggattgccagcaactaccaggagatggacagaggcaaggaaggrgctcccttcgtgtcttcagagggagcatggccctgctgatgtcttgacctcagaattctgaactccagaatgatgagaggataatttctgttgttttaagccacccggtttgtggcaatttgttagagaagccctgggtaactagtctggtctccttgctcccrttggtcttactgagccaaagcatcccattggccttactgagccaaagcatcccattgcatcatgtttgttactgtaaccctcaaatctttttcttgacctaactcttagcaagtttagccactggcctttgatcatctcttagctgcaataatcttcacttgacagacaagccagaggcctggctggaggctcaggcccttcattcagacagctcaggaggcctggactgtggctgggccagttcctgtggccgggctctaagtctcagtttccccatctgtataatgcacacaacagggatgttggtagagattacaggacatgatgtttataaagtgtgtttataattttattttgtgggtcagtacaatgcctgacccatagcaagtgcttaataataaatgttagctattattaaacatacagttttctgaaatctttaaatccatttttatccaccccagggtgaagtttccctgatttttcttttccagtaaaagcatggcagatcctatctactctcttagtgatgcacaatgacatctgggctagtgcctgacacagagtaggcactaaatatatttttatggaataaagaatggamcaactacattgtttcaatatctaatcaaaggaggaaatagcttacagattttatgaggcttagtaaccagcttgatacactcaaggtgaaactttggaaaaggatgtaatttcaccacatttgttcacaatagggcacaggtgatgtggtagacagcctccaagagggccctctggatccttgccctggaattcacacccttgcatagctccctcccccattgtaccagggtcagttagcatgaccagtggaatacagcagaggtgatggtgttatcacttccaagattagattattggagactggggtttccatcttgggctcgctctctcccttggattgcttactttggggaagtcagcagccatgttgagcagccctatagggagaggctcatatggcaaagccagctacagctccataagcaagcatggacaccattctccagcttgaccctgaacccaaagcacctagctgatctgctcgcagactcctgaccctcagaatctgtgagataatgaatgtttgttgtcttcagtcacttaggtctgggggcaatttgtgacacagcagtagataactaatataggtgctgagataggaatggctgggaccaggcagggtcaggactgaggactctaataatggaagggattataagttgcagggagcaggcaagaggccaaacccagaaaagtggtctgttcggaaggtcaggcaggttctgtgggtctccacctgtggctgtgttccagaacccagagaggtgagagccagaagcaaacacactgaggaacaacgggcactgagattcagggctcttggactagaactcttgccttttgactttgtcctgtacaatttccagctagacccacaattgatcattatagctaagagatgatcaaaggtcagtggctaaacttgctaagaattaggtcaagacaaagatctgggggattacaggaacaaacatgatgcaaggggattataaatatttttttgaaactcttaacaatattcttttgttactttgagttacccaagctctttaaactgtctgccaagctcaaaggcaaaattggtatttcccaggccttttggacgggtcatagtgcaatagaaaggtggaaatattgsctgggtttatgaagacataacttcttatccaattggcaaacattttttaaatgcctactcggctgggtacaaaagaacctagaattattctgagcacccactaccagtactcaatgcccctgtgtaccaaccttggctactccaatacacacacacacacacacacacacacacacacacacacacacacacacacacagttggccaaagaagcaacctgtctgctctgcacaagccaggtcttcactttactgaagccccagctgacccctctgggctcaaactttactgaagtgaagacctggtctgtgcagaggagataatgacagatttatctgtccttatttcaagtcttgaagccctgttgacttagtggctaatctgatcaactgatttgaaccctggggatagcgtcctgtaagatggcatctgccttttcacaggggactcagagccctcaacccacagacttgaacaaacaggggcttttcgcatcccccgtcttacagataggttggattctgggcaactggctgctctgcaaatgtaaagtgagaaacagtagggcctggtaatggtgagcacagactccagagccagacagcctgggttcgaatctcagctgtgctactcactagcagtgtgaccttgggccagttacttaatctctctgagcctcagtgttcccatctgcaaaacggagataataataacagcatgttccacacagaatttggggaggagtaaatgagctcatgtgtgggaagcactcagccgggctcctggctcacaggaagcatcctgtaactgtttccttttattacgcaggatccagaggcaggggcagccccagctgacccctctgggctctaatttaactatctgttggggttcaccggaggcagatgtccctctttcaccacaagtctcaggggttctttaaggacttcataaaaacaaaggattaactgcagatgactaagcccacatgatggaaacagaatcaggtacagtaaataatgaacgtagacaggattagattcctacaaayaatacattgtgttctcctgctcttcattggcaatcatccccagtagggaatcagtggaactctttgagtggccaaggaaaacatctccatgtgcccaggatagcctgggtgggctcctggaggaggcaacccttgagcagaaagccgaagagcaatctggcctttgcaaatggagaaagagtggatgcatcagcagagaggagagtgggctgggacaagggtgagagaaggaagcaagcacctaggcccaaaatttaagaaggccctcactctcagggttgtacaagagcaggggtggcacttgtacagccctgagagtgaggacctccttaaattttgtaccctaggtttgttcttgcctctcctttgtcttggccctagagaaaagcctgggaaaaagcccagaacggtgaaacgacatggcgtaactaggaacgtgtgagtcatgcaagattgcccaagcctaatttagggacagagatgacttacagtgaggctagcagtcaagctgtggccggatcaccaaagaccctaggtgccaaataaaggaggttagtgcttgaactgaaagtgacagggagccaaggaagaattctgagcagggctgcaacatgatgagatttgcatatgagcaagcttcttctggcattggtgtggaggactgattggaggatgataggagaagctagaggctgggaggccagttcaggaccctactgaaaactctatgcccaagggagagacgacgacctgatatagggcagtgccagttaggagtaagaatgaagaactcactcaagacatgtgttgaaggcagagttgacagaacttggtgattgactgcagatgaggatcaaaggaaagacccaaagatagcatgaagtttcaaagatggtcatcaatttagaagccaagggggtttattagacaagataacaagcatgtgaaggcagtgatttcagcttccccaagtccaaggtaaacccttagttctcctgttttctgtaggataagctctctggaggctaggatgtatcttattcatttttgtatgatatctactctgtaagtatctttgaactgcattaagtggctttcacacctccgcatcctgctcattggctttcaagtggccttaggggtgttactattgtttgaatgtttgtctyctccaaaaatcatgttgaaatttaatccccgatgtggtagtgttgagaggtgaggcctgtaagaggtgactgggtcatgagggcaaagctatcataaatggactctgtgcagagtccccaccagcaagaaggccctcaccagatgcaactccttaaccttggacttctcagcttccataactgtaagaaataaattctttttctttataaattatctaggttcaggtattgtgttataagcaacagaaaacaaactaagacaggtatcaaagtccttttaaagatggctgtgtagctgggatcagaccaacacagcaatgtgttcaaactcccattctaaacacacagaacctggggctctgacttggccccacggtcttgagttgaagcctgaagtgtgactggatgtcaggcgtgggctgccctggggctttgggaagtagtgaaagggataaggtgaaggtcaagcagagtgggggatgtcaggaggctggggaggcttgggctgccaggtgaagtgggcctcatgaaagacaatttgagatcagaatgtcagacagagagcaggctagaaggcagctggcttctgagctgcagcctagaaaggctgattcagcagtgctaggaggaagtgggaggttttgtcgtcccagaagccatatctggagcaaggggaagtactaagaccacagggtagcatttggagccatacactgggactaacttcctctgacctaggcaacgacagactgcccctgtggtcaaccagagcccccagatccttttctgtgagctacaatgaagccaggcctcattcttcttgaacttgagaagtttagaaaatatctgctttgccttcactagcctccattttcataaaaataaagcgagtgaaaaaagcaagtctgagcgctttgaaacattaattaaagacaccacagtttccttatttaactgagggttgctacctcatctgggattattagcaaagcagagagcctttgttgtgctcgacaaagtgattaattcagactcgaggtgaattttggctttctcaacttcttttgatgtgctaagatcccccaatgaggacaacgtcatcaattacttaagccattaccttgagatcacaattatcggggaggcccagtctactaattggcagacagagagacagaaatggactacagggttgtggcttcaacccttaattgttctagggggagcgagagtcctttaaaatgttttgtggcaatgctcctgctaatctggggtgatcgagttgtttttccaccaggcaaaatgcagcctgggtgacctgcgtctctagaaccaagaaactgcctgtgattccactgacttggcgttctcatgggccaggacacagaactcagaactgagggatgagtgtgtcaatggaagagggatgaggttcataaaattggaaaggagagctttatttctcataaagggttgcggccttcgggtggccattccgacaggctaggaagatattttgatggaggggaaaagggaatgggaatttatgcagagcagggaggccaaatatacatattcaataagctatgggaggagtcatgaatatttatgaaaggagaaacatgtgcatgcgcaattgagcgtcatgcgccttcatgggtcccatgtagaaaaaatggcagccttagcataatctgagggtggagttttcgagcctctgacttcaaaaagtgaagcaaaggacaggaaaaccctcactgagcatcctccatacaatggccagaatcactccataatcggtggtctcgtatcaggcaaaagaaaggggcagcatcaggtggcaggttgatgtcagcggtggaggcttttaacatcagacgctttcagggcgttatggcgtcaacaccaatggaggctttgaaaaggccgctttctatttagcccttaggggagaaagcataatcatggctagtgagggaggggtagaaggagtgtgtctgactccccatcccatcatggccaagaactcagttttcaagtttactctggggaccccttggccaagagatggtccattcagtcagttgggggcttaggattttatttttagtttacaagttctagaagcaaacatcctactcaagaggcaaattctccagcccctggaagctgtctttgggcttccgtgggatgctacatctgggcttactgtcccctgacacataaggaattcaaggaccagatacaagaggctgctttttacattttaaaatatataatcatataatattctgtttaaatagatttatctttgttcatttaactaagccattactctttttttttctctccatcctataaaagagtttttgggggaaggttttatgctgcatggatatatgtcattggtttttctggtgaaaggtggaggaactttgtctggttaaatttagtcaaataaccaatacttaaacaaacaaaagccacccctgaagtgtttcataaatatcagtcacttcaagagttttatgatgtacgtcagttgctttgttctgttttcacaatagaaacacacgttgtgtgtgttttcggatggtggcactactgtttgctgtaccttcatcattcttctttaattctcactgggacagaagggcaagacactttcccagggtcagaatcctgggattggctggctggattttcttttcttcttaatttttttttttttttttaagagacagggtctctctctgtcacccaagctggagtgcagtggcttgatcatagcttactgcagcctctaattcctgggctcaagtgatcctcctgcctcagcctcccaagtaggtgggtctacaggcacacaccaccacacctggcaatttttaaaaattttttttgtagaggtggggtcttgctatgttgcccaggctggtctcgaactcttggcctcaagcaattctcctgccttggccccccaaaacactgggattatgggtgtgagctaccacgcctggccttgggctgaattttcttgggggtgggatgggcattttaaagcactcttgagaaagtagaacacactccattttaaggcagtttctttgcagtgcttcttcgtacacatcaacccyatgctcactctgccccatggcctccaggtgacccatctgttccaaggcagcagcctttccagtgccttcacctgctatggtgccacaacatggctctcgtttattgtgccagctttgacacctctgttctcagtttaatgatttttctggggatgggtccttcttggagggtcctgctttgtttttgtttttttccagattaactttgggggacataataagtggagaccatttatcgttttttaaggctcaacaaatatccaatagtcagacagaagagtgatcaaaatagaaagcatgtatttaaactgggactgacaggtgacaggggatgcctcwtagccacaatgatcataatgtaaatgcttaattaactgtttgtcagtagccattgaatgtctgtctggtccactaggctgtaagtgccacagagcaagggcatgtaggcatggtccctgcagcatcctggtacccggaactcagcactcccccagcaccatgcttggtatctgctctctggccatggttttgaactatcagctgagcccaagcaaccttgcagaccacattttgaytatgtcttcctcggaccatccttgagagtcaygtcttcttggcagtgtcccatagactgtgaatggtgagtgagatcactttagaaggtacacggactttaaaaawctttcattataaagcatttatttattttttaatttttaattttaattttttattttgagaaggagttttgctctcgttgcccaggctggagtgcaatggcgtgatcttggctcaccacaacctccccctcctgggttcaagtgactcacctgcctcagcctcctgagtagctgggattacaggcatgcgccagaattaaccatgcccggttaattttgtatttttaatagaggtggagtttctccatgttggtcaggctggtctcaaactcccaacctcaggtgatccgcctgcctctgcctcccaaagtgctgggattacaggcgtgagccaccgtgcccggcccaaagcattcattttttatcgttagttttttttttttttttttttgagacggagtctcactctgtcaccccaggctggctggagtgcagtggcatgatctctgttcactgcaagctccgcctcccgggttcacaccattcttctgccttagcctcccaagtagctgggactacaggcrcccaccaacacacctggctaattttttgtatttttagtagagacagggtttcactgtgttagccaggatggtctcaatcttcttacctcgtgatccgcccacctcagcctcctaaagtgctgggattacaggcataagccaccgtgcctggcctatcattagtttttaatttatgtaagtgatactgattttcacttatgatcacgacataaaatttccttttaaaatgaattcatttcaatttatctaaaagaaattgggaaataagtaaatgtacaggcaacttgcagatatggccaaaattataaaggggctatacaaataactgaatttagaagattaaggccttaatactcgttgagacttactgactcaactggctttcttgccctgaaaagttaggataaaaatggagaagttagttaactctctgaattacaataaccatcaactagatacctttttaaaagaattgtaatactttctttataaaacgttatctttggccaggcatggtggctsacacctgtaatcccagcactttgggaggccgaggtgggtggatcacttgaggttaggagttcgagaccagcctggccaacatggtaaaaccctacctctactaaaaatacaaaaattagctgagcacaatagtgcacgcctgtagtcctagctatccgggaggctgaggcatgaggcttgaacctgggaggtggaggttgcagtgaactgagattgtgccactgcactccagcctggacaacagaggaagactctgtctcaaaaacaacaacaacaaaactaaagaatatgtattcttggctgtttcagtggtagggctaccaaagcctggttcagtgctgcccaaggcagaggctgggtactgggtgagctctcggctggccttcccccaccccaccccctgcaactgtaccatgtactgttcagttctgtagaaacaggaagctcagggtaactcacagtccccaccccagacacttcttcttttcaggcacacttcaaaataaaatcaggatctacatacactataagttggygtggtagctgaatattggccccctaaaatgtcgatgtcctagcctctggaacttgtgaatgcaaccttagatggcagaactgattttgaagatgtgattaagttgaagatcatgaaaggggttaagtattctggattgtttgggtgggccctaaatgtaatcatgaggtccttataaaaaggacacaggagttgtcagagcgagagaaggcagtgtgaggactggaagcagaactggaaggttatgaccatgacccagggagacaagaaggggacaccccctgccatctccagaaggaaccagccctgtggacaccctgcctgtaaaccagtgaggttgattttggacttctggcctccagagctgtcagagaataaatttgtgttgttttaaatccctcagcttgtggctacttgttataacaaaaatagaaaattaatacagttgggaaatataagtttacctaaaaatattccttcgcagccgggggcggtggctcatgcctgtaatcccggcactttgggaggctgaggtgggcggatcacctgaggtcaggagttcgagaccagcctggttaatatggtgaaaccccgtctctactaaaaacacaaaaaatagctgggcgtggtggcacatgcctgtaatcccagctacttgggaggctgaggcaggagaattgcttgagcccgggaggcgaaggttgcagtgagctgagatcatgccattgtactccagcctgggcaacaagagtgaaactctgtctcaaaaaaaaaaaaaaaaattcttcacttctgacaggattctgcatttgatctattatgtaagacacttactatacatatagacagggtctcgctctgttgcccaggctggagtgcagtggtgcgatcatagctcactgtaaccttgaactccagggctcaagcagtcctcctgcctcagtctcccaagtagttagtactacaggcatgcaccaccacacctggctaatttttttttctttttagaattttttttttttttttttggatctcactttgttgcccaggctggtctgaactcctgacctcaagtgatccttgacctcctttgccttggcctcccaaagtgctaggattacaggagcgagccactgtgcctggcctgtttaaaataattctaatggcaaaggattcaattaacaagtctcaaaatggatgtaagttttgcacaggtattcacatggctgaagtaccaaacatggtatcatgaattaagtgcgtaacatctgacaacggtaacacatgctatttttgtattattgtgaactcatggattcaaaatatatttgatgtgttttggtccattgcaattattattttatggagcaaattgtccatgtatcagtcttgctggcctgaagtcaaggtgtcaggcaggctggttccttctgggggatccaggggaatattggtttcttgcctccttggttcacggttgctttactttaatctctgcttccaggcatcacgttgcccaaagtaaatgaggtggggatgtataatcctccaactgggagggacagtcatgtcttaacccattatgcaatctactgtgtctcaagtgtttctgacttgagaagttggtggattgtggttgcaatggtgatgtagagatgattgggagacaacagatttagtgggtaaattaaaatcagatttagattaactgtaaaatgcctaacagacattcaaagcatccatcaagttggaagttgggtaaggaggactggagctcagtggagaaaatggaactagagttaaagatgtggaattattgacttttagatggtattgaagtgatgggactcaacataaggaaaggagccagcaaagacagtgaggagcaatctttgaggcaggaggagtggtatcatggaaagagggaagagagtgcttcaggaaggaggaatgttcatctctatcaaaatcctactgaaggatcagtaaagaaataatgggattgataagatcaaagtcatcaatgatcttgacaagggcagccccaaggaagctgtgggtacagaagcttagttggagtggggggaggagagactaagggcacagaaggggaggaagccatctagacaatgctttcaaggaaacttactgggaaggaatgaagaaaaataaggcaatggccaaatccaaggagtttgccttttttcctttaagatggaagacactggaatatgtatgctgataggaatgatccagtagaaatggagaaatcaatgcaacaggaaggaacaataattgagaataatgagtaaggacaaggagcaaaactaacaagattggctttagataggtaaagaatccctctgtctctctctttctcatcacaatcatcagttcattagtatatgttattaatacacttttggtttctaagcagcctgcctttgttctcagcatattgtctacatgttctcatgttgtgctttatccacaaagtcttagcctaggggacagaaagggacagtaagtagggttagtgaataacggcacttgtctgaaatgtagctgacctggttttaactctgactcaattgcttagcagcaccttgggtacattatttacctctctaagcttttatttcctaatcagtaatataagaatggtatttatttctatccttatgtgattgttggagggcttgtacaagacagtatataaaaagtactaagcatagtgcctgagacacaggaaactaaaaactattgtaaattataataatagtaatgattgtgtaactcttgtatgtcaatatacatgtwtaatatatttttcttgtgcagtgacaaagttattgtcaggctaatgactgcartgactatgtctttgtggtacctacattattggtgaaagaactgaacaccagccagatatttatgtatttattgagtagtcttctattttttttccagaggggtaaagattataagcggttccttaggcaacaaattataatggctgtcattcactaaatcttgtatatagggtgggacagaattgaaaaaacaataggaaggtcttgtaactccaacatatctgttctcctgaggtttgcatgtgtacatcttatagcacattgatattcagaagtttcctattggaatgcaactatcagacaataaaaccactacattaaaaatgtacagaatgcagataaagaactacttagaggaagatttatagctttaaatgcgttcattgaaaacatgtgaactaaactaataacttaagaagttaaaagaaaacaacaaggaacaaagtctcaacccaaagaaaatagaaggaagtccataatcaaaatatgagcataaatcaatgaactagaaaacaacaaaaatcagaaatgatcaacaaagaaaaagttggtgctttcaaaagataaataaaatagataaacccatagcacgactaatcaagaacaacttttccaggcaagctaggagtagaaggaaatatcttcaacccaataaaggatatctatgaaaactctaaagcaaaacctcacacttaattttgaaacattagctgcattcctgcagaatcaagaacaagaaaaggatgcttactctttctgcttcctttttgtactagagattttagccaatgtaataagaaaagaaaatgagaagtcagacaaaaggattaaaaagaaagagaatggactgatattatttgcataaaacataattatcagcataggaaatcaaagaaattccacatgtaaaccaataaaactaattagaaagtccagaaggatcattgattacaacgctggcattaaaaaaaaaaaaaggtgctcctatacatgagcaacaccaaaacaaatgtacgtaaatagcaaaaagatactcttctctgcacaaaatcataaaatgttactgaaggacagagaaaataaaatcaacagagagatacaacacattcatatatgagacaaattgatgttgtaataatgttggtatgttctaaattaatgtatacatttaatgcaattccagaaaaatccaaatagcattttctcatcaaatcagactaattctaaaattaatatgaaaaagtaagttataaaaatgtattatatggtaaaaggaatttgagtaagaaaaaaagacaaaaaagagaataaaaagaagtaatatataaaaaagagaaaaaaacaaagagtgtgatttagagttataataattaaaatagtgaagcataagctagacaaatggatcagaatagatccaagcacctatactactgaggagcatgatagaagtgacattatgaatcagtgggaaaaagggagcagtgcagcaggcacaacatccctttgctaaccccttggagggatgtaatcagctgtgggacaggattattttaccagggtcccactgagataccgattctgttgagccacctctcattgtagaatctggctcaacacaccctctgatgattgatttggcttctcaagtacctggaaaggaggtactctaggaaggagatgtccgattcttattgcttggaaaaaaaatactcactattataaatttgtaaatgaacagtctcgtttgcaggttgtattttagggcatagcctagttactactgatacgtgagtgagtgtgcatcagatgatttccagccctgagggcaaactgagattgaggtcttaagggaatggagagggggctgaacatgaggatgaggatgccagggtggacactaggtgctaaaagggaaaccgagaagatctcacgtgtaaaatctgtattgcaccatttccccaccaacccttcaggaacatctgccttgaggcgtgatttaagcagtttcaatccttacagtttctcttgtgggtgtgggtgagaaatgggacaaggataaagggaatggaatttacagtcaactaacaaggctgtggttagttattagctaagtcaatgaaaactattcagatttatctgcttatcttcctcttcacacccagatatgtgcgtggagtcagcttgcagtacctatcaatgactgctcattttccaactaatttttaaatcagttagtggagcacaattctgcctgccacctagataaaccatactgtgggaatgagggggagggaggaagaagaaggaggaggaggaggaggaagaggaggaggaggaagaggaggaggaggaagaggaggaggaggaagaggaggaggaggaagaggaggaggaggaagaggaggaggaggaagaggaggaggaggaggaagaggaggaggaggaggaagaggaggaggaggaagaggaggaggaagggagggagggaaggaagaaggaagggaggaaggaaggaaggaaagaaggaaggaagggagggagggagggaggggggaaaggaagaaggaaggagggagggaggaaggaaggagggagggagggaaggaggaaggagggagggaggaaggaaggaaagagggagggaaggaagggaagaagggaagaaagttagttaataatgtcaaaaattgggaaatatttttgagaatgaagaagaaatgataggaaaatgtgttttctctctctagtaagaaaatagatgcagacatcaaaatacattgatgtagcttacaaattagaaaaaagttttatgagagcatttggtgcaaaggatataccaacggtaggactagctgggacaaactttatggaaagcaattagatattacataccagtgtttaaaaccagtgactcatggatctcaggttaagaaaatcttcatgcacaaagtgtgggaaaacctctgcgcagaaatgctaactgtagcagcataactcaaagtagctaaaatatagaaaacacgctaagtatttgacaataagaatggtttagtaaattataatatgtatataagagcactattaagcagccataaaaatgatatttataaaggattaataacatggagatgtttttccttatgttaaatgaaaaaagtagaaatctggataaatagaagtagagaaataagccaggcacagtggctcttgcctgtaatcatggcactttgggaggctgaggcaggcagatcgcttgagcccaggagtttgagaccagcctgggcaacatagtgagaccctgtttctaaaaaaaaaaaaaaaaaaaattagccacctgtggttgcgcacacctgtagtcccagctacttcggaggctgaggtgagaggatcacttgagcctgagaggtagaggctacggtgagctgaaatcacaccactgcactccagcttgggcaacagagtgagaatgctaaaaaaaagaaaaagaagaaaaagtagagacataggaaaaatatagagagagaatgtaatagcaaacatataaaaaatacacagtgaaaaaaaccaagagaatgacaatataaagagagtaggctttctccctgatagttctagcttttgtgcccaaatttctgtgaagcacttcaaaatgtgtcttggaaagccagcaaacctcacaccctgcttccatttcttaacaaaacgttttgaaaaggcaattatttaaggatctgtttctaataaagcttccgatgtggccatgatgtttaatggaattgctggcaaagcccatgagggcatgcgtgttgaaaccatagagtaaccatggcaaagggcctctcttctccaatgtgcaggacactgggttacctggcaccgctgggcttcacctgttcttggagcatcacaagtttttacccctggagaagcgctatttgccaagggaatctttcaccatttcaaatacatccactgaagtttttgaaagcagtgcaccaagtaggaattctttggtagtgacagtgaggatgtaatgaccgagcggaggggccggctggacccttctcctgcacaccacaggagaagccaattcctggaggtagataatttctgttttcttttgttccaaacctcagtcagtttgaccatctccttaatatgtgattcatcaaaataccaatttatcagaagtggcttctttggctaaacaatgggctaagcacccatgttgaatccatcaagagaaggttttaggctgggcacggtggttcacacactttggaatccccacactttggaaggccaaggcaggcggatcgcctgaggtcaggagttcaagaccagcctggccaacagggtgaaaccccgtctctactaaaatacaaaaattagcctggcgtggtgggcgcctgtaatcctggctactcaggaggctgaggcaggagaatcgcttgagcccaggaagaggaggttgcagtgaactgagattgtgccactgcactccagcctgggtgacagagtgagactctgcctcgaaaataaataataaataaataaataaataaataaataaataaagagaaagccttgaggaagataaaatacaggaaattttccagcctttacaaattgaacctgattttgagaatgatccagtggcccgatttattttgagaatggacagtaaattgtaccgctggcacagcagtatttgtgtcctgtagcgtttaatgacctcgttggttgtgaaaataaaaccgaaagatgctgtctaaagctatatatactttctgttgtcgttttccaacttaagtatccttgatgtaaacaatgacaggtgtccataaccataattgtgggaaacatttgcattaattcacatcaaaggaaacccattgtaaacatcagaacatggtgatcgtctgatcattgcgtattacctgctttacacagtagcatccctggcctcctgcacttttttaaatggcacaggacttaataacacaatttgacataaaaggattttttttacaatgacaatttttaaagttacagcaagatatttaaaaacaacttttcattgaccctgtaagactcactcataagtatccctagtgtaccacttaacctagggctgccatatcaaagtactacaaacttgagtggctggaaactccagaatttatttatttatttatttatttatttattcattttttgagacggggttttgctctgttgcccaggctggagtgtactggtacaaaagtagctcattgtagcctcaaactcctgagctcaagtgatcctcccatcccagccttccaagtagctgggactataggtgtgtgccaccacacctggctaatattttttttttttttttttttttgagacagggtcttgcttcatcatcccagctggagcgcagtggcacaatcttggctcactgcaacttccacctcctgggttcaagcgattctcgtgccttagcctcccgagtagttgggattacaagcctgcctggttaccttttgtatttttttttttagtagagatgaggttttgccatgttggccaggctgatctcaaactcctgacctcaagtgatctgcctgccttggctccccgaagtgctgggattacaggcacgagccaccacgaccaggctcacccggctaatttttttacactttgtagaggtgagggtcttgctgtgttgcccaggctggtctcaaactcctgggctcaaataattgtcctaccttggccttccaaagtgctaggtttataggcatgagccaccacacccagaccaccagaaatttattgtgtcacagttctgggccaggagcctgaaattgaggtgtctgcagggctatgttccctatgaaatctgtaggggagaatccttccttgcctcttcctagcttctagtggttggctgactatctttgacataccttggcttgcagtggcctgacaccaatctctgctttcatagtcactcggcactttcctgtgaatctctgtcttcacatggccatcttctcataaggacaccagtcatattggattgaggggcccctgtacttcagtatgactttatttatttatttttttgagacagagtctcactctgtcacccaggctggagtgcagtggtacaatcttggctcactgcaacctcctcctcccaggttcaagagattctcttatcttagcctcccgatttgctaggattacaggcatgcaacactacccctggctatttttttgcatttttagtagagatggggtttcaccatatgggctaggctggtcttgagctcctggcctcaagtgatctgcctgcctcagcctcccaaagtgctgggattacaggcatcagcagccgtgcctggcctatatgacttcatcttaactaattacatttgcagtgaccctatttccaagtcacattctgagattaggacttctggaggttaggacttcaacttatctttttggtggtgatacaattcaacccattacaactggggttcattgattttgggttaagaacgtgttgagacagtcagagggcagcaaggggaccctgagaccagagggtatgaaacaagagtgcagagaaggaagtggtagggagacaaatggaacccatgttgctattttgcccataaatttggtggcaatgatctctccctgcagatttgggtgcaggaacttgagttactgatggcaatatttggccagtttccagctgaagatgctcaagttccagatttgagtcgaggctacaaatgctcaagttccagatttgagtcgaggctgcaaagggaagtttgtggtggtgtccaggacactctgctgatgccatgtgtttgaaaatgtctgaattttgtgcatagacacactagcagtattttcataagtggagttacataattagggcatggacttgcataataattagcatgtgtaattaggcacagacttcttgtcctttagacaatcaagacatctaattacaaaattaagatgtaattatgtggtccaaggtctacatctttttttctacccattagagattacttttagaaaataattcaaaaaagctgatgaagaaatgaacatagacacgaatttgaggatgttaaagaaagtgttaagtgggctggtaagtttcctttggtctttcctctctgttgtaaggggaattatttaaaacattatggtccacttgaaagaataacttttaccaactgtgctgtcaaccttcggtactcacactaatgaagaggagtgttggtatgactaatccttggcgttcacgtgtggctcttgagtgtggtttgtaatcacacttgaacatggacctaaatgtgacgtactgggaattcattcaaacctattaatggagccatacggtggaaatcttaggataacttgggatagaggacatcctgccttcccgttctgccctggttctcccttgtgaccactttaaaaatcgactcatttggccaggtgtggtggcttatgcctttaatcccagcactttgggaggccaaggcaggaggaycgcttgaggccaggagttaagaccaacctggacaatatagggagaccctgtctctacaaagaatctgaaatactagttgggagtggtggcacatacctgtagtcccagctacttgggaagctgaggcaggagaatcacttgagcccaggagttttaggctgcagtgagcctccactgcactccagcctgggtgacagaaataaataaagaaataaatagcacattgctcagaataatgcaaaccagcacttaagctgtgtttcctttccctgaatatttgagtatttttattttaagtactccttattgactgcaggtgggaaagatcaaagagtatagcaaatactctgtcctttgaaaaagagtgattcttatagcagtaatagtttgagtttcaatacacacagaaagctagattgtactgatagtctccatgtttttccttgcccttaaattgtgatttggctgatctctgcgtgatgctwaacaaccagtttgactcattaattttgctgaactaactgaacttttgacctaattggctgctggttagggatcagagccatatgtgcaggtttttctaagccagttctgactttagctgtgttatccctctgttcctataaactgttgaaataccatagtaattccaatgttttgacagccacactgcacttctcagactgccgctttctcctgggaagtggcacagaaatctgtcggaccacgcttcctgatttttggttaagaaaatatgcttcccatatggttgcgggccgagaaaacaaagacttaaagaggttgtaagcatttggtgataggtcttctcctcatggcgccttccctccgttcctatttttactattctctgtaaggccagggaatgtgatgagggacaaattatgtgtgtggcagggaggggttagtcttgaccatgaaaatacacacatttgcacagggagcttttgccattgttagtttttttaccttgccttctgagcaattgctcgtgatagatttagaggcaaaggaaaggaattggagagagtggcatttttaaaacaatctattaagaggaattctaggtcagagaggggcagttggactacatcatctgtaaggcatctccagctcagaggtttcaggattcgttgatctccagcaggtcactcaacaggaggttgactggactcctattctactcactcaactctaggcctccaattttttggttcttagatgtggtgactggaaacctattcttttgcctttacttccagagagctcagtaattctagttcctaatagagcctaaagcatgagtgcaacttcatttctcagcttttgaaatctgcttttccctccaggtactccacatcagcattctcaagactggagaagttaggcctcagacatcccaagccttctcctttcattggaaacttgacatttttccrccaggtaagggctgtcttccattggcttccatcataaaatatgctgagggccaggcacagtggctcatggctgtaatcccagcactttgggaggccgaagcgtgtggatcacctgaggtcaggagttcgagaccagcctgaccaacatggtgaaaccccgtctctactaaatacaaaaaattagctgggcatggtggctcatgcctgtaatcccagctacttgggaggctgaggcaggagaatcacttgaacccaggaggtggaggttgcactgagccgagattgcaccattgcactttagcctgggcaacaagagcaaaaatctgtctcaaaaaataaaataaaatgaaataaaataaagtaaaatatgctgagcccaggacaggctttctgcatgaaacattggtcttgtccaggtccccacaccttgagcagtaaaggtgttctgtgatgccatgagccctcctctacttatatgaattgttatgtgatggcaagaatccatctcttatcactatcaatatgtattgagtcctgtcatccattcactcacccatttcccccaaaccccatatattgtatgtctaaatacgtcagaccctagagtgtagaagaagaggttacttgtgccctcaagtgcactgtcaaatgatggcatgcaacaccagatgagatacaccctagcactaaatagggtggtatagacggtagctgtaatcttctgtcagaggagagggtgatctgtcagggctaaaatcatcctaaggaacttcctgaagaaggaggtccttcagggcctgtggacatagagacgagggtacacacaccaggtgggtggcactatttatgtgagtgtaccaacgtgagaatgwcagcacaggttgaccagcagcctggactgactagaggccaaatgctaaggtgcactgggcaatgcagttgggtgagagaaaggggcactagatgcttacagggtaggaaggcacgtgaagaactatttgtgtgttaacatttttgaggacagggacattgaaatggacaacactctgcaagggagaagaacataggttagagctgtagaacccaactgttgctgaagtccaggggtgaagccacgatggctcggtctggtcggtgatgagagtgaatagagatggataattgggagcaaaatgaagaactcttgtgacaaattagtgtagagaattcaaggcaaagtgagtcaaacataagcctaagctttgagccaggggaacagggagaatggctatgggttgacagaaataaaacgttgggtgggggagtggttcagggagaagacaagttttattttaagtatgttgcttgggatttgccagagtgacatgccagtggaaatggccaacagacatttgtagatataggtcaggactttatggtctacggttattttttctcacattgggttttctcagaagccagatggcttattctgctaagtcacggggacactgactccagacccaacgccaggagccggaacaccctgcatgggaagaaccaccaagccaaacaaaggcaggaagactaaatttgggacaatcctgataatatcccttcaacatctctagaatttcccccatccctacctccggaaaggctggcccttggcactagatagaaaagaaagctgctctttctgtccttttctgcccccaccttctcaattatttcttttccattcctttctgtgtccatcaccttttccatgatttgtcattgttgtttctgtcttcctagcatttttaaacaccttctcctctcatctctctctctggggtgggcggttcacaacttttaagctcacaaacaacagtctcaatgaggcttcctgttagccccttgaaacaagtgtgaagaaattttaaagtgtcaagatagaacaacaaaccagatcggaaagctaaagaaaatgcatttcacacatttctggggggaaatgatcagttgtattccgtggaataattaatttggtattaacattctgaggaaaacggcgtagctgtcgacatgaggagaacgctgtgctcccgcctctggagagcctccacatatgctcctttgcagcccgccatcctcacagctacaagccctgccaagttctttctagaacatagtaatttcgctgactatttttatattcatatatactttccttgatatatggcaagcttacgctgcagaattcagtagatttcatgagaaaggcatgtgtttccatgcaggacatccacactcctaacccccaactttccaccttcattccaccccttatgtatccaccccatactccattctcacaacacaaatctaccatttgccaccccccacacccaccccaactcatgagtattttcaggtctagtccattcccaccacacaatggatctagcattttccacccctccgtcaacccagctacacttctttcccattataaaatgtgtctagccaggcacagtggctcatacctgtaatcccagcactttgggaggccaaggcaggcagatgacctgaggtcaggagttccagaccagcctggccaacatggtgaaatcctgtctttattaaaaatacaaaaattagctgggtgtggtggcacatgcctgtaatcccagctactcaggaggctgagacaggagaatcgcttgaatccgggaggtggaggttgcaacgagctgagatcacaccactgcactccagcctgggtggcagagcaaaactctgtctcgaaaaaacaaacaaaacaacaacaacaacaaagtgtctagcattttgtcttatatatcttaaacatgttgaatttaattaaagtttaactcgaatggatcatgataattcagaatttgtgataattttgatagactcagtagaagttacatatagtggcagtaaaaagggctatatgataatgctaaatcaaatttcagagggcaatgttatagttgagaaagcaaactttttgaatattttagcagcaagtatacataagtagtttaagaactggtgatctctcctgtccaagacttttacatggcaattttttttaaagccttttgtttattccaatgtttcaaagtacctgaaagcaatataacttccattcttttttattgtttctgtaattgtattcttgctgttccaaattgtttactgaataagtttgaataattggaattttgcttaatcttattcttactatagtgctgtgtttccttcagggtttttgggaaagccaaatggagctcagaaagctgtatggacctctgtgtgggtaagaaggaaactcaacgtttctattatgtacgatattttctattatgtacgatattttgattttcacgtgttgaactgatatagaagaaatgccaagattaggaatgttgtatgtgtttctatttttcaaagggcccacaaagagggagtcctgcagtacagacaaggcttctagagaagaccctggggttgcccacggggggactctgctggcctgaaagagtaccactttccagcctttgcagccttgctgggctgggcacagcatcatctcccgttgctgtgctgaggggtgttgccacgggatgtggtggcctctttgcctcagagcacaaactgtccaacttgccttgacagtgcacagcaggtcttaccccatgagcatatctgaaccttactcagactcgggtccttcagcccatggggaaagtgtgctgccagcaacatgaccgtgtaatttatcacccaatccagttcccttttgaaagtgaaaggaagtgctattaataattaccccaggataaccttatcacctaagactatcccggatatgctggggcatatggtcaccctagttcttggccgtgtaaagtaatatagcccttctctttattttctgaatttctcctttgtatgctcctttgtttctaaaattccagattctggtgagcaaacccacgttcagaccacttactctattcaagatttaacaggcttgaattgtattgattctcaacatgtgtctttccacactgaagtcctaatcattttagttggttttcacgcagcttctcttcagccactgagcgatttttttgcagcttttcgtagacctctgggtcagcgatcacttttgtaggtgcattaaagttctcctgtgttgccgacgtacattccaatgggctccagtgatttgggggtcctatctccatagtattcatgatgtctgttctcctgatacccatttttgaaagggattggcttgtcctctttatggaaatggcccctcctaggaagcccacagttttggtcaagttcttctacctactttttggtttgctacgtggtcctgaaaaagtaataaattaagatgttaagatgctctctgtattagtcattgctgcataatggactaccccaaaactcagtgacataagcaacaatttatgatttatcatgtgtctaagggtcagctggagttggctggcctaagctgcacttggctggatggctccgctggacttctgggtgtatctgctggggaggacctcatgtggggcaccaaggctctgcatgtctctcatcctctttggaagtgtaagctcggctggcaggttctcatggtaagggcaaagactcaagagagcaagcctgatggtgcaagaacattatacatttctgctgaatcatttcagcttataccctattggttaaaccaagtcacacggctaaacccaagatgtgggcaggagggcactgtggccactttgaggccaaagcaagacacctggcccagcctgacattgatggagcagggaggtgtactcctcggatggacgagcggggaggcaaggcgtgtctttaaataacaagcaaccctgcttcactccctaagatctctttcaacttggccttcacttactttttcatttttgctttttggtgcatagcttcttgctttaagcgtgataggtgctcgataaaggctcaagaaattgaactgtctacatttctcttaccgttgtgtggttctattgctttttgtttttgttttttgttgttgttgttgtttgtttgttttgcaatagagtcttgctctgtcgcccaggctggagtgcagtggcatgatctcagctcactgcaacctctgcctcctgagctcaagcgatgctcctgcctcagcctcctgggcagctgggattacaggcgcccgccaccatgcctggctaatttttgtattcttagtagagacgggattttgccatgttagccaggctagtctcaaactcctgacctcaagtgatccacccatcttggcctcccaaagtgctgggattacaagtatgagccactgcacccagtctattgctttttttttttttttttttgagacggagtctcgctctgtcgcccaggctggagtgcagtggcgcgatctcggctcaccagtctattgctttttaaaggttctcattccagctctttctttcaaacagtctcattctgcagctgagttggcaatgacttggagactgtctcatatgcctctgagacacagcactgactcagaatgacagtgccttcaccagaatcagaaaaagtcctgactgagtttgaattctaggaaccacttttcttgagtgtttcttgtacagatatccaaagtagagcctttgggtatttaaaaataatttgtaaatgccaaattaagagtttaaagggcactgtatgaactagttgtgtgtgtgtragagagagagagagagagagaaggagagagagagagagaatgacagagaaaaagagagagagagaaaaggagagagaaagagacagagaaagagatagaaagagatagagaagatagaagagggggagagagagagagagaggagagagagaggtggagcgaattggtttccttgacaacaggatatccaatcaactttttcctccaactttaactgagttaacacaatttatccttttcatttcaagaaaacctaaatcatagagaatgatttcaaatgaggttatagagatcaagattgcagtatcatctccattctttgttcccacttctagtgaaaaggaaaaaagaaaggtgatggcataatttcttcctataaagctatcaacttttctcctttggaaaaaaaaagatgagccataaaacactgacttctttttaaatgtgtctactcccagatttagaggcaatatggtggcggtgtaaaaatgaaagggttgaaccaatctaaatcgaatgtcttttctaactctaaatgttattttcttactgcttaaattttagcaacatagtttcactcattgggaatggactatgctcaatgaacagcaaagacccttcttgcagagaacaatttaatttaaattacattagtttttattttattttttattttacttttattactaggaaatataatcaatcccagcttggtcttcttaaaaattgaaataatagattgattcattatttgacaagtgaaatgccacactctacactgttgatgccgtgtagagatgtattgggcctttagatgacagcttggcactgaatgttgggagaaaaatggacagggcaaatctcctcactgctcgagactggaaagccaactatgatggcaatgtatatttattatctggttgtcaccctagcaattcaagagtttgaggctcaaaactggaaattgactccttactcaattcccctcccactccctaccatggggacaatagggctggagaaggtttccatcaagatgggcagacaacatcaatgtttatcattaccaccaacactgccaccaccaccaccatcaccaccaccatcatcgagaacaaaatatcttcaccaagtgtctacttatgtagcctgctttgccaggttctgtgtaaataaaactacacacggtgtctctgccttctttgaacttgaatgtaaagcaggaggactggcgtggatacctatacagctattagtcgtggtggtacgtgataaaaaactctcctgaattgcacagcaacctggccatgtaacacaaagaaggcaaggctttattgctttagataaccttcatcaattaatgattacttgttatctccttcaggctgagaatgagccccaagttggatttatattccttcccaaactctgtaagaacagaatcaacattatcgtcatacattggtgattgaatatggtttatattcaatatataccaatattgaatataaatatatattgatatatattcaatatatcctgtttggatagagattatatcccctccaatttgtagctggactttgtaacccagtagatgataaacctttattaattacttatagttaagtaagaataaatatttacacagtgccctaagttcaggtcattagcaactcctaaaggccgccattcaaagctccttttccctttatctcattttgtgtgtgtgtgtgtgtgtgtgtgtgtgtgtgtgtgtgtgtgtgttttgttttgttttgccttttgaggcagagtcttgctctgtcatgcaggctggagtgcagtggcacgatctcagctcatggcaacctccacctccgaggttcaagtgattctctggtgcctcagccaaccaagttgctgggaatacaggcatgtgccatcacgcccagcaaatttttgtatttttggtaaagacggggcttcaacatgtcggccaggctggtctcaactcctgacctcaagtgatccaactccctcggcctgccaaaatgtgggaattacaggcgtgagtcaccatatccagcctatctcattgtcttttaaatgcttgctctatagttctgcttttacttagccttatccccgtttcttcttcccccaacatcactttagttttgatcttggctccctcttgttgaacttgacttttacacttcctggcatccatcagctatgccgctccattttggtaagtggcacctgcatccctggatcccttcatgatgccagccttgttgcataacctcatatactcccatcagagcatcaagttgtaggtaggtaagcatgaactttgtacataattcataaagtacaaatgagtataagaaaaaagtacacttgctcccaccctggggcccatctgctccttcacagaggcaacctctcttaaaaatttctttatagtcaaatggatcatatatgatacatgctgttctttaccttgctttgttcattaatggtatttgggaaattgtcccattttgcttcattcattcttgttaaattaggtagtgtttttaaggatttccttgtatgaatgtatcctaatttttaaaacaagttctcaattgataaacatctcttacttttacaaacaccatcgcagtgaagattttcatatacacatcattgatgtctggggtaagtatgcaagataaattcctagaaatggaattattaggtcaaagatggtctatgtttttaatttcgataaatatgactaaatttctctttctagggtttatgtcagtttagattcccataaatatgcatatgtccctcccatacttgtcattaaaatgtgtggtcacaattttaaatctttaccatttgatggtatattgctgcagtttcgatgtgcatttctctaattatgagcaagtttgagcatcttttcatatgtttaaaatgcaatgtattttgttttctgagggatcctttgccacttctctgttgggttattgatcttttcccactttatttgtagaagctctttgcatattaaagaaagtagccttttatatgccttaaatagtttctcctctttatcattgtctttgactttgcttatcatatatttcttccaatcagaaaacatttgtttttgtgttgttgactttaattgattttaacagtgtctacattttgcatcttactcagaaaggttttctccaccaaggatattttttcataaactttcatttttctagtttctttaaattttatttttaaaatatagaatgtttgatatatcaggaatttatttggaagatggagttagggacacacccttttycccccccyccaggagggtagagttccatctggaaattcatccttttccaaatgatttgaaatgtcacttttatcatttattaattcctaggtgtatttctgatttctctattctgttgtactgcttaatcacaagccagggctgcactgaatatcctcgtttggatgtcacgtttgtagcttcttgtacctagctgcagtagggtgttctaagaacatctttgtaagtatcaaagcctgaagcaatctatctcccagggaaccttaggtcccatactgaaaaaaaaaatcaatttagcaaataaataagcctttggtataaagggcctgacacttagcttcaaagttcacaccacaggagggggaggtgtctcatatgcctccaagttggaggtttttagcaccatttttaaaatttaattagctagcatgcatgaactaatagcaccttgtcaccaggcagtgaggaagttgagaactttgggatacataaggaaaagcatgtggcatcagcaatcaaaataacaaggtcgtttcaacactttttaaagctcagcttccatggtgccatccattaggagagtctgtgttctggaagtgactaaggtgtgaacacttttygtgtaattgctcttaaccatcatgtttatgtactatttagatggggttgaagaacagcatagagatggtttactttaatactggcagatggctatgtgagacttcctggcctaccatcatggatcaagaacaacgggaattgaagggctctgaaagactcacctgttggacatgtttgttctttgacttagaagatatgagacatctgaatacactgggcttgaacatgtggctgaggatagggtagggtggaaactattgctgatttgtccaagaaaagacaagtacttagacttaaattgggcagctgacacctggagatggcacttgtttttaaactggactgagctcagtagaatcatagatgttgaagaaaggtggaaattaagccaccgttgtggaagagcttcccagacactgatgctaaggagtcaaactttaggtttttgctgctgataaaagtgcaagcctcagtatgaggctcatttactaaatgtttgacccaaaaatgtggctcaattctaagaggaattgatgaaaatgaaaatatacatagtatattgagaaaacacaatacccttgaaacagtggaattaagcacagaagtcctgaattattctaacatctctggccatgaggccaaactgtgggcaatatttgggtcccctagcttggtgaaagctggctttcatgaaagcgttgaaagcaaagctgtgcattgccgttcccaataatgtgaatctgaaagcaaaattcatgtgagaccatcatgatggtctgtaggtcataattattgagcatcattcagtgagtgaaatatcaatattctcactggtcaaaatagcttaatcatgaacactaagcctgtaagagcaccttttttaaatgattggaattcactaaactgcattattgcattttaggggggccattattctctaaaagtgaatgccctgacatagtgtgctgatgttttaggaggcctttgagaataggaagaaagttgtccacaggacaactatcaccaagccaagcacactgcccagtaggtggaattatcaaaggaacaattgtccacagataaataagtggcttagaccaaagagacagaggaatttgatttgagtcccacttttcttgaatgaaccattaatagactcttcacccttacctgccaccagcatgatctcgttataccaaatagtgtattgctacaaagcttccatgctttcttatgatttaagaccaccttctttcccagtcttgatccaaagacccttctgaagtttacctaattttctggacttctaacttcttctttcagcccatttattttataccagttcatttccccccatcctctttctataacagcatatgggtgatggttgctgcatattttaatgactactgctatctaagtctttgtgacccaccctcataaagatcaagaacctgtattaattccctcttctttgggtagaarcatccaacagggcatgatagcttacagtagaaatctgcagttaaaatcccagcttcaactttctttctctctactgcttgttaccttaatggatttaggccaatcacttcccctctccagctttagttctcttagatgtaaaatgtgggatttggactaggtcggtgattttgacactgtttaatcatgaacctcagtaaataatatattaaccacattgttatctaatacacacacatacatttgaaataaaagttttacagaagaacaccttattcacagtataagaaccactttgatctattctattgtattgtattctatctgtaaaaaataaaacatttacaagttggtcacagcccattaaattgatttcatgaccactagtgagtcaaaatcagcaatttgagaagcaaagggccagatgatatctgaagtcctttccagttgtaaactggatgactacaarccaatgagacagcccctatcagtgtgcatcagaaaattgttagaggccattgtgtttgcctctttgtggtttaagattctgagaaacctctgtcaaagtcagtaaaagcccaccgttcacagctgaaaccgaactccagtggaagcacttctcctgcagagaccagctcccgcacctgactgtgggcccaggctgggcacctcccacccagtagcaccttcttgttytttaaaatcacaagttcaactattattgaaattatttccaagccttaactcggaatcatgctaagaagctaacacaaatatattaattgaccatttaagacatctctctgtaagatttttgcattgggtgtaaatatctaagtaattcatgtggatatcttctcccaggtaggtgtggccagctgattacttattcccagggagytggagcagcaggaaggaatggcctggaaactggaaataatcccatttgccggggtaagctagctgtggaaaactgaccaggctgtgggtaccgagagagcagcttcctgctaaacttcctgctgtgggtgaagggcagcgtttaaagagtaagatggtgctccccattccagcaaacactggccacagtggacagtccaggagagagctgtgcaccaggaaggtgtcagctggacagtagtcargcgtccagtaaagcagcgatgaggaggctgtcagtggacaccagggccccactagtgggtggttcaggaacctgagaagcccccggccctgagaaaggagtctaggtagtacagcagggtctcagcggtgagggctctgaggatgaaccaggaattgacattcagttctaagattcacagcatcatgtgaggcccaggaccagaagccagacctaatctccgatatcagtcagggtggacaggtccatcatggttggaacagatccatgctggagaggcaccgagtctcaygatgtgtggctggaggttgttcctgcttctggggccagggctgggcctgcagatgagggacagagcacctggctagaaaggagagaggactgcagcggctggagcgtcagccacagatttttaattttgctttccttgatattcacatccaaaatctaccatggagaactgtatatcacgttcaaggtggaagggaactaactcattcctcattagtaactatcaaatatggcatcagtaccttctttatcctgtaagtgacagctctgcacagatgtgttcccaatcgatagaatgtctcaattaaagttgcataaaagctctattttgagctaatatcttcaaataataaattccacatttaattgaagcgtacctgcaacaaatccaagttgttcaacccaaaatgcataatagagtatgtaaaacagtcatgaatcactgtgacatttgtcaaggcattctcccatctggaagcaggtccagaaagcacatggctgtatgcatatatcttttgtcaagaactttgcacagacagtctcaaaaagtgcacacatttacccaattcttagggctcttcactctgattgagaatgcaaatagcattcctattctatctaaaaagaagaaagacaagccatctttgatttcaaaatttaaaagaaattattactaaatttgaagaagcaatgagttcccaattcacttagagcttaaagttcctctttcatcactattttgtgagcagaggaactttttccaaacaagttcttagaaatccttgcttgattaaaaaccagttctaaatcttgttactcacatagggcaaaaggtaaaggaatctaaatgtctaaaaccaaattaactccagatactagtgtgaactttcaagcaaaaaaagtcacacaccaccgcatacacstttgaaattctactaaattttgaatgtttgacgttagcctttaaactggaacatattcttctttcttccttaggatctttaaatcttttaaagtttgggttgtttactatgcattctaattactcctgatcactcttatgtgtaacatttctatagctatgcacacaaagtaattccttagcaaggccccaccaagttttatgatgcctgcttgcctagggcagataatataaacttaactacgaaaataagttctttgattattcttcgtatctcaagaccgtgctcctaacaacctctcctccatctcaccctcaagctgcaagaattttgcaacccactctatgaagtttttccaccctgagtaaggctgtcagtttattggcctatttataaaggtctgactctctgacatgttctccaggctccccacattaaccactaaggaggcactctttgcagatgaatttttttttttttttttttttttttggcctcggcttaaagaggaacctattaacctttgcccggaatctatgsctggtgaatggcttgtcatagcatgttagtttgatgaggcaattgtggtcttttttgttaaaacaccccccagcacctcttgatactacttggcctactggagatgtgggcatccaggattgaatcaaaactactgcacttcacaacagagctactgcaggaaggaaatccaggtactccctggcttgtgccacctccatcttttccgtggctaatgtaatgcctagtgcatattcaccacaaagaggcaactgttgaatggctcttccatttgcctttgaagattgcttgtaactcttcaagttcacttcttcatctcactgccagaccacagcttgagactgatgattgacatkgccactaggttcttcccaaagactccagcctaaagattgttagctgcttcccccaaaggcttagccttctctgctagagttttggttctttggagcatcccatgagcaagaagcctcagctctttgtcctcctctgtgtaggagcccacaaggatgctttatctccaatctggaatggacacttagcatcctkagttctgccctgctcaaaatccatacctgttcatgagtaccagggcttcagggcccgagaacccacagctaacacccataggagaaaggtttcatatgagtaggtgggatgggttttcatgcctctacaacctggccagcaggaggaacactgtgacccatggtttcagaattgatggtctcccacttctcggttagatctaggtattgagaataacctgaaggacatttggctggaggacattatttttattgtgttaaaatatgcatcacacaaaatgtactctcctatttttcattgtatagatcagttgcattaagtaccttcacattgtcgtgcagctatcatcatcgttcacatccagaatttttttcatcttgcaaagctgaaactttgtcctcattaaacattaactctcccttccctcctcccccaggccctgacaaccaccattttaccttctgtctctacaaatttgactactctaagtacctcaataaagtggaatcatatggtatttttccttttgtaactggtttatttcacttaatataatatcctcaaggttaatccatgttgtagcacatgggagaactactgcctttttaaggctgagtaatattccattgtaagcctattctgccttttgtttattcgtttgtttgtagatggcggagtgtgttacttccagcattgagctamtgtgaataatgttacttgaatatggatgtggaaatacctctttgagaccctgcttttagttcttttgggtatatatgcagaggtggaattgccagatcacagagtaaatctatttttagctctttgaagaccgtcatactgttttccatagtgaccataccatttcacctttggaggacatcttatagcaatgctttgttgtccccttttcaccacgattatgtggccattacttcttgttttcaaaccttgagagtgagctcaggttaaatttacacttccctttgtgccctggatcccaactggtcaaggtgaaccacacatttctaattggaatgtatgaccccagtgactttgcctgtaacttccttttggctaggccagtaagcgcatttttaaccaaaccgaccccattatcaacaaatgcttgcactgcacgataaattcagtttgctttaataaattcccagtagtcctcacccagagctccttctcctcttatctcactccttgctgccaaaccctttacaatttatgtgtctgcctttcggttctgccttcagccccctccaagtttcctctttcccaccagctcactgtggcctttgtgtctcacataaattttgtcttctgtgtctgaaactcttactgacttctgcttccttgytccctgggtctacactgttccttctcttcctggaactgacccttcgatctctgggcttcctaccttgagtaatttgtcaaaatcctgttcttgcaattggtggcttctcaatttttttcctctgggtttttttcccacagtctttccactatatcacagggcatacactcctgcttcatgactgttcatgacatattgaattcccctcttgtaccccacagtctctgcactgagtgtgtgctcattgggaaaggttagctcacattatacctatccaaaaaaggagaggtggcaggtggcctgtggagaagagtgtatccaggcacatatgcatgggagaaagttcagaggttttggctgagatagaaagaagaagagtagaggccaaatgtgtgctaggaaaatgtgatgtttggggcacaagtagagaggacaaccttggcagtggcagaygagagagaacctcaggactggtgctaaggaggtgggttatttaaagaaagttgtgcaggtatagagtggagaaggggtgcagggggaggatggaattgagttaaaaaaaaaaactagcaaaaaacattctgatagcacaggtgagagagataagagtgatttagattatcagaaatggaaggaaaagaaggagaattttatagagaaagtgtcctgtagtggccgggtgtggtgactcgtgcctgtaattctagcacattgggaggccgaggtggggagattgcttgagcccaggagtttgagacagcctgggcaatatagtgaaaccacatctctacaaaaaataccaaaattagctgggtgtggtggcatgtgcgcctgttgtcccaagtactttggaggctgagataggaggatcgcttgagccaggaaggcagaggctgcagtgagctgagatcatgtcactgtaatcctgtcgaaaaaaaaggaaaaaaaaaaaagaaaagaaaatgtcctaaaaatgcagcaagtcattgattgtaacaagtaagagatgagtcaacattaatcactgaggctgacttcaaatgctggagacaacatggtgattccaccataattaagaggttgaacagggcaaagacaaaatagttttatctttttcttaatccgttggagcttgtcctcatcctcatgtgttcaagctgttataacaaagtgccatagactgggtggcttatgaataacagaaatttatttctcatagttgtggggactgggaagtccaagatcaaggaaccaacagattcattgtctggtgagggctcactttctggttcatagatggtgccttctcactgcaccctcccgtggtggaagaggtgaaagagctccctagggcctcctttataagagcactaatcctgttcaagagggctctgccctcatgacccatttgtcccccaaagaccccaccttctaatactgtcatctgggggtttaagatttcaacatatgaatytgttggggggatggatacaaacattcagaccatggcagagctgctaaggagacattgggtgcaaggtgacttaggaatgaagcactcagaggatcaggaagctgcattaggaaggagagaggaatgggagctccagggtaggcctgraatccggaatctccacctcccaccctccaacaatcgaatggggtgtttcccgcagtgtgtccttgagaccatcgtttccactgacagtaataattgttacatggggaatagcaaaaggaacacaggtctcttcagtgtagaaagactccgaacctttcatgcagcaatgtccttcgacaatctccaagtgagaaatttaggatgcagtctcttttttttttttttttttttttgagacagagtctcgttttgtcgcccaggctggagtgctgtggcgcgatctccgctcactgcaagctccgccttccgggttcacaccattctcctgcctcagcctcccgagtagctgggactacaggcgcccgccactgcgcccggctaattttttgtatttttaggagagacggggtttcaccttgttagccaggatggtctcgatctcctgacctcgtgatccacccgcctcggcctcccaaagtgctgggattacaggcgtgagccaccgcgcccggccaggatgcagtctttatttgaccacagaacatttttccccccagagtatttcttgggactaggatatggagaacaggctttgagagaaaacactgatctaataaataccagcattttactcctaaagaattccccataaaagacaaccattaatagaaatagtttacttcaccattgtgaattatcaacattacaaccagtaattactaattacctccattttgagttgatgttttgggggatgtttttatcctgcagtgctatggagaggctgggaacgcactgctgcctgtgttgcttgtttatttatttccttttattcccagtgttctctcattccccttcccatccccaawagtcaaccattccaattgtgtttaatgtgtttttttttcacatgttcttgcaaaytgtgcattatcatttcgtggatattatccttagtttatgccaatagtactgccgtagatctcattctattccttagttttttcatttagcactgtgctttcaaggtccagcacagagttcccattgagtctgctgcttcccatggctgcctgacatgccacggatgcctgtacctacttcacctgtccactgtcccaggaggagatacccagtggccctcagcaagcaaccctgcagtgggcatccttttatgggacctctacggacctgtgggagaactctatgggctatccatcttgccctatgattataatatatatatatttatttatttatatatatatatttgttccctaaggccacttacatattaattgctaataatctgaaagtgttttccagcactcagtgtggatcatgtccctccaatatagtatctcccatggccatcccaataacatccctgagagtttggccgggctagttgcattatcctcaatcatacagaaacatgagtgactagaatgaaaagggcgtgtggctagtaagaggtgtgagcagagttgcacaggttctttttattaatccaaagctctttccattccactgcctcttcttgctgtttcttcaacattccaaacagtcctgccttaggacgtttgccataacaatacgtaacataattatttgttggttgacctgctttcctggtagaatgcaaacttcacgagggtagggacttgctctcttgtttgtgctgctatttccagtgcctagaatggtgactgacacataatagatgctcagtaaatatctgttgcgtgaacagaagaatcatctctaagtacatgtctttcatgtcagatttgtctccaaggaaacttcaaacaggaaggtcttgctatttggctaatttgggtaatggtactattttactggagacaaataaaaggaattagggggagagtctcatattaaaatagagggttggataaggggagtttatamtctttccccatcagtggcttttatgctctatcaattcagtagttagcccatcaaagtaaaaaattgaattacactgtgtaaggccaccttgggatccaaaagataaaagagaagataagggacatgttytcctgatacactagctgggctccactcacccaagtcattaattggagtcttattgggctactgcctcatatcctactcccgaagagytgatacctcccataacctcattcttagggtcagctggccgtaccagaaagagcactggattaggagccagatctgggttctggtcttagctcagctatccctactgatgggactagaatgaatgagtcatttatcattttcttccctttaaaaaatacttgaggccaggctcagtggctcaccgctgtaatcccagcactttgggaggccgaggcgggtggatcatgaggtcaggmgttcgagaccagcctgaccaacatggcgaaaccccgtctgtactaaaaaaatacaaaaattagcctagtatggtgccgcgcacctgtaatcccagctactcaggaggctgaggcaggagaatagcttgaacctgggaggcggaggttgcagtgagctgagatcatgccactgcactccagcctgggcgacagagtgagactctgtctcagaaacaaaacaaacaacaacaacaacaacaaaacaaaacaaacaaaaaaacttgagcacctacctatctcacaggtctgacatgagactcaaaggagctctcagagccctcccagggcagactgtccaagtatcagggattccaacygggattccactgctccttggtgttcttgtagccagcctgcatcttggggagtctgccgaattcagaagccccatacctcaccagctcggggtgagcttcttgagtcctgcacatgggtcctctcaccctcatgtctccagggactcctccgcctgggtaaggggagacagcacacatcatccagtcctctcccctctttgggcctcattttcctagctatgaaatgagggggttgggctagaatgatcatcttgaagcttccctccatctctaaagtattatgatcagtgctttattattttttccctgcctctgatttctctcccactgtgtctgaaattcttttgccattaaattttctcttctttcagagttgcatatctgggctttttatacctagtcctggacagcacattcttcccatggcactgggcttcctcccctggcctcactgtcttttcaggagtgacattagctttttcccagaccgtgtattcctgttctaagcccacacatcatttggggagagatgattttgccatgtactctcacaaatatatgtcctgcacatattctatggaatagacacacacacacacacacacacacacacacacacacacacacacagctcccttcaatacccccgaatatacatgcctgggcataacgtgtgggcaaaaatattcagggacagccaaatgactattttaatgttcctttgtccctgcagggccatcgaactatttatttagtagcttgatgctgtttgcatcaacaactttgccttataggctgttcttcatgtttatgattcttactgtgaaaaaaattgcttgcctaacatctgttctgaatttgttttttctttatttttatttatctgttccccattgaattacatttgcaccaagaacagtaacttgaattgtaatcttcagtgtccttcaggatttctgcacacttcaatacatctcttaattactctttttttattgttatgagatatacatatatacccatgctcacactggcagattggtttgtagcttacctctgcctgtccccctctggggactaagttttattaactgaataaattagatgggtgggtatattcaatagagtagggaggtttawcattacaggtttctttcagatatttttcccccttgctgcccagttctctcctttagccatagctctgttttggagaaagctttattgtagcttgacagagtcataactcaccaggatgagaaggaccacttcatcttatagatgaagaagctgagggccaggggggaggctatcttcctgcctgcttccagaaagcgtggagaatagctgccccagcgccattcttgagaggtagagcacagcttgaccctgcctctccaggctgccaagcctgggggctttccttagcagcaggaggcctcctgggactaccgtgccaccacccacgcaccacaccattgctgcagacccagtcctttgcagagcaagcattttgcatgttttccatgggtgtggctgggttggggtggttagvaaagtgtgcagaagatggtgtgggagaagggcagggcatggagaatcacagtggggtctcttcatgcttgtggactctcctggtggagctggttctctggcctccctcaggctggctcgtgtgactggagccctcattaaccccctgctctcaccacttagaaaccaacccagggaccaaccaagcatattcccagcagtaggcaagaagatccctaaagaagggaagtgagacctgcgtttwttcccctgatacttgggaaatctagcagatatagagacagtgacccaggtatccaagggattggtccaaattcaccatcctgtaactcgaaatgcaatgctctttctaccatcggttctccattctttctggaaggtgtgtcccccttcttccttttgccctttcccacactctttgggggtctatgtccatgtcttccaatggcacaaagtcagaggggatggtttccccatgtcttgaagtgctcactgctggccctgctccagatgttgtccactcaacagacatttcagtctttgctacrtgtacagcatggagctcatggcagtgggagagactacccatcccctccagaaaatgtatcattcatgtctcttttcccaaagaaagctgacatctaatttaggagaaaaacccagacatgggccaagttgctcaagaatgccaggtagtatagtggctgacttctacaagagaaggacaggacacccagaaagaaacccagaagaacaggaaacccagaaagaacaggaaacaggattctgggtagaatcatggaccagtgaaggcagagaaggcttctaggaggaagtaggtcttgaagaatgaataagggggaggtgagggcaaagaatgttccactcagtaaaaacagccagagaaaagcccttgaggtgggaatggttgggggaatggaagttgtggctggagagagggacacagatggattggccagtcatcatcacacactggaaagccttcgttgccaggcgaagacatgtttgttatccttttgttacccttgctaatggcctgtaagctgcttaaagccatgtcttgcaggtcagtttctagagatggggtttgaggggcaagatgtttactagggatcagtgaagggaaggaggagaaagctgtcagtcatcccccagtaggacaaaatgccacctctctgtgttcctactcagcccggccactggatgtgggctttaccaggaagggggtgaccccagtgacatggatctcagcagctgaggctggccctgaaggagctaacagctggaggctccctgctgaccacagtctcggctgctggacagcaagtccttcccagaagggggatctggacgacatgtcttgatgtcatcacatcatgggaactctagttcaaatgaagtttttggcagaatcaccaggttgaagtgggaggtgatctgagggttctgtatgctsagcttccccacagaggactctttgccccgctagacctgagactggctggggccagccacaaaggcagscccatggctgatggagccaacagggcacctctgcagggggcacctctccagggtggtaggagtgaaatagagcaggccccaagttttagaaaatgaccaggggctgggtgaattttggaagcaagataaatgtggataaagagaaaaaaggattctgaggtttcaagtctggcttcagagttgaaasctccttctgccaggaggagtaatagggaagccaagaggataaaatgatttcccagtcctggaaaggcagcttaaaaccatccttccacttgctcttaagggtgaggcgctctgctagcttctcagggatgcacggacagataagatgggctttgtcttgagagaacttgcagagcgatcaggagcttatcaataaacagagggtgatgcaggtcagtagaggaaaggaccaggtgccacagaaactacaaggagcgaagggtccatgaagccttcacaaagaggggcaggtgacccgactgtctgaagttttccaaactaacaagagggcagccggcactttagagggtaaatacttgcaaagaggcagagcagggggaatactgcacatctggggaaccataaataactttttcacagcaagaatgaaaggctgtggttcccaaactgtgtgctgagacaccccagggtgccacagtgaactcacaggggcttcctgggctatggtattttacacattcgtgacaaatacagcaacatctgtcaggcactgtaggaactgctttcagtttatgtgtattatttcttcaaatgtccactaacttgctagaacatgtatacttataaagttgtttgaacttatctacttagaaatgagactgtggggttcttcttttggcctggggagcgctacgaagacattactgagtcactaagggcaccgtgaactgagaacgtttggaaacacaggtataagaggaatggggtgaggagagaagtcaggagctcctgaagggcccctgcttggttacaagtgaagaagcttaaacttgcttcaaatgatggagaaccactagagatttatagggaatagaacgacacagtcagcttctgttttacaaaggtgattggccttggcgggagggttggtttggagacagagagcttcactgggagctcctcagtggtccaggcgagagagacagggcctgaagccagttggcattagacgttggagctggaatacagcacactgygttgacatcatggaattcccactgcatgcttaacaccataatgaacactagacatcaaagataagaagacaagatgtgtttccaccactcacaracgagcagaaagacagtcaggaaaaaaattacaattactagagaaccactaggagtcaaccaggcaagaaaagaggagccgttccaggcraggcagggggaacagcatgtgcaaaggcatgggagtgagagatcatggagggtttcagtcggtatgatcaggattggctcttggcggtggggtggggagggggaccgggggcaggcaggcggggggaatarggwggcacaaggccaaagaacaaggcagggagcagggtgtgaaggacatcatgtgccacatgctaaagacttggcaaaccattgaagggtgttcagtaaagaagcagcatactcagatttgcactttaccaagtcctaggtggataagtggagttggggcccacatgtggacaagcagcaggtcagaatgatggagacagaaacctctgagtgggaggtccaaagtctggccaggaagaggaccagggattgtaccagcctgaaaagggcaaaagaaagttgctgaacaggctctacaaactcctgaaaggggaggggctgagaaagcgctggttcggtccattgatctctgcagggctctgtgaattcagggtggaccccaggcatgagtactctgagggtaacatgggcagatgttgcctgaccctgctcagagtgacagacaggagccctgggaaagcaactccagactccatggcctatgactgtgtcactggctcctcaagaaaactctccctggtagctgagtctgctctgtcattcagctgactcaagcctcttgctctaatgacagacgggagagctgacccaaaagggaaagacactccatgagccaagcagggacagagccccaggactctggggaccctgctttctccatggcaccctgtggaccatccagccccggaggagcgcctgtgagtcraatgcccaggtactcccagcactggacttctccttaactttctctgaactttctggaagttgagcatctcagacactcacaactgtgatctgcagtagcgtctacccctttcctcactgagcctcctgccgcttccacatggacattccatggcaaaggtcagacttgagggtaggacagcagctaccctgttagcatcctcagcctgctgggaaataaaactgtcacggagacaagaagttctcagatgcttggcatttagcagttgtcagaggagctgaaagccctcatcagttctacctgaaaatcagaagtttcccaacgtgcatggcttttttttttttttttttttttttttttttttgagacagagtcttgctcttgtcacccaggctggaaagcaatggcgcaatttttgtacttttagtagagacggggtttcgccatgttggccaggctggtctcaaaatcctgacctcaggtgatccgcaagtgctgggattacaggcrtgagccactacgcccggcctgtgcatgcstttctgttccttctgctgatgtggggggtgttgggctcctgtcaggggcctcctgatgccccgttggggcacttcctcgctcagcttcctcgtccctgacaaagtggcagcagcagggtgtggcccatggaaggtgaccatgaccagcattttcattaaactttactgttcggacaaactattctcatctgacctcataacggtctctttaatcataggaacagtttcaagaaggttgatttgctcaaggtgatacagctgttaaattacaggacaaagccttgagcccaagttcctaagactctctgacacctgcaactgtggcactgccagccgccactctgcctctgacagtctcgggggaccaatccagtgacaaattctccctctcctttttttttttcattgcagaagtcacatgcgctcattataaaacactgaacgttcaaggaatagataagatgaaaaggacagtgccccataatttcctgctccagatctatgccctgtaagccaggggtctgacacagagtatgtgctcaataaatgctttctgaagggactagttaatagaaagaccgactataatttattaacagagctccccatactattttacaatgtgcttttccatttggctgggtcatttggacattttttcatgtcggtgcctgtaggtgaccccctgcccaccaccaccaggaacagtctatagctcggtcacccctaacaggggcaggccttctggaacaaggccaggcagcccccaggctaatcccaacagtctattctacttaagttcccagaaggcggctgtgaactattttggtttaactgactggtcagtttcaaaaaagagagaaaaccactaattaaacaagtcaaacaagtggttatttttgtctacacaatacttcactgatttgcctacattttctcttcaaccaggtgctttggagttgaataagtgaattcttaattgcatagctaaatgtagatgaataactggttaagaatttcttgcccggaaaggagtctatatgtaagtttggattagagtgaaccaaggccttacctctttaattgggctgggggttttctggtccattaagcaagaatatgctctaaatctccacctttgaaagccacagtctgcacagctgggagcctgcctgctttcccttgcacacctacccagcactggagcgggttcaaagacaggccacccgagctaagagcagtcactggaatagatgacagcatgctcaccaccaaggacctgggctggggtcaagtccctgtcttgggcaagtgactttgcctctctaagtctcagtttcttattctgaaaagtggataaaataatgtcctcatccattttctatgagaattacatgaggaaatacaggcaatgcacttagaatgaagcctggtcaatagtaaaccctcaaaataaatgctaacgattgttgttaatctcaaaggtttgagaagaatctacaacctctgcaaatatttcactagtatgagaagtttctttgcaccctataggaagtagacctaaaattcaaacaccccatactttaatttcctttcaaatttgtaggaattataggatttacagttccagtaaactacagagataacttagttttcactcccatatttcagccatggcccagagagtttcagaaatttgcgcctggaacggatttctgtgtgagtggtatggctggatgaacccggatcccacctgctaagctgttgcatattaatctccaggacccatgccacctcagggagcaggaagacactgcctcacattcacacctttgtgcaataccaagatcaggcccttctagggaagtaagctttgagaggcagaatggcactgggaattcacaaggttgagaagaaaaaggggcaccatactagttaggacttcctgatttcaaattatgggaaacccaacacaaactaactttagcacaaactaactaatgtaagctaggaggatggaatgaagagctgcaggaggaaagtttggactctatattgtgctttgtaggcagtctgtctatctgaaatctctgctggtctctattagctccttctgcagaccggctctctccatgtggtacaaaaatggctgccatcagccctagattaatatattctcagtttagcagctccaggagaaagtcagagcttttcaccccagcatccatgtagaaatcccaatgaaggatccataccggcctggagtgggtcatgtgtccaccccttggaccagtcactgttgccaaggagatgagatactaggattggccatgcctgggtggtgagcccaccaccatgaccagaggggcagggttctatcactgagagctccttcagaactgcatggaatgcgagggtggttcctcaagatgtagtgggcagacaaaagcaggtgagccatcccagacacccaaaacgaaagctatgtgtgcctaggacacacttcccttacattttttctccattcaaggtcttttcaggagctcctcaaactacagatgagagtttttgtaaatataaattcacaagattacacaatttacatgtaaaatgggaccagttttctcacgagattcataaaccagctctgaagcaattctaaaggaattgttgcaaaattgtttttagcattagcaatattactacaaaaaaaaaaaaaaaagaagcaggaagactcccaaggtgactacttggaaggacaactttcatttgaaagtagaagtattattttgttcctttaaaaaaatctagattatgcgtaagattattatgataactaaatcaatacaaatatattaccaaaagttgcgtgtgccctacagtgtaattgctttccttttagatctaagaatttagggaaatgagaatgggtgtgaactttggttaaatatagagcaggttttcacccaatcagattgggtccacaatctgtcaatcacatcaggatcccctgggagcttgttaaaataggaggtgcttgggtcccaccccagagactctggtctggtaggtctgggtagggccaggcattattatttctgaatgctccgcagttggttttgacaagccctcgaggctggaaaccatggccctaggacagcatttctcagagtatggaaagagtcctcttgcatcagaatctgagagctggttaaaatcagattcctgggccctacccaggcctgctagattagtcttggtagggagcttggctgtgaatttagagtttattaagctccccagtgactttttaaaaatttttaattttgaaataattatagatggacaggaagttgaaaaaaatatgtatggggaagtcctatgttcccattacccagcttcccccaatggtaacctcttgcgtgactatagtacgttatcaaaaccaggagaatgaccctggtatgacccacagtgcttatcatattttttccaggtttatatgcactcgtgtgtgtgtgtgtgtgtgtagttctatgcagttttatcacctttgtagatctgtgtaacccccaccacagccaagataaagactatcctatgaccataagctctctagaactacccctgtatagccacatgcacccatcaccacccccatccctaacccctggcaaccactaatgtgttctccatctctataattttatttcaagaatgttatgtaaacagaatcatacagcatgtaatctaatgatatttgttttttcagtcacaaaattcccttgagattcatccaaatttgtgcatgtaacaatagcttgttcttttttaaattgctgcatagtattccgttgtatagatgtactacagtttgtttacccatctacccaatgaagaacatttgaattgttttcagtttttgcctattacaaacaaagctgctgtaaacattcatgtacatgtgttctgtgaatgtaagttttcacgtctctgggacagatgttcaagagtgcaattgctgggtcatagcataagtatgtggttagttttataagaaatcgccaaagcggctttatggttttaccttcacatcagcaacttataaatgatccactttctccacatgtttgccagcctttgatgttatcactattcttttaaaattttagcctttctgatagatgtgaaatgatatctcattgtggttttaatttgaacttcaccaatggctaataatgttaaacatcttttcatgtgtttacttggcatctgtatatcctctgtagtgaaatgtctgttcatgtcttttgcccattttctattttatttttccataagttattgggggtacaggtagtatttggttacatgagtaagttctttagtggtgatttctgagattttggtgcacccatcacctgagcagtacacactgcaccatatttgtgtcttttatccctcaccctcctcccactctccccaacccccaagtccccaaagtccattgtatcattcgtatgcctttgtgtcctcatagcttagttcccacatatcagtgagaacataggatgtttggtttcccattcctgagttgcttcactcagaataatactctccagtctcatccaagtcactgcaaatgctgttatgtcattccttttaatggcagcatagtattccaccatacatatataccacagtttctttatccactcattgactgatggacatttgggttggttccatgattttgcaatcgtgagttgtgctgctatgaacatgccatgcaagtatcttttttgaataatgacttcttttcctctgggtagatacccagtagtgggattgctggatcaaatggtagttctacttttagttctttaaggaaactccacactgttttccatactggctgtactagtttacagtcccaccagcagggtagaagtgctccctgatcactgcatccacgccaacatctactgtttttttaattattattttttgattatagccatttttgcaggagtaaggttgtatcacattgcagttttgatcggcatttccctgatcatcagtgatgctgagcattttttcatttgtttattggccatttgtgtatcttcttttgagaattgtctattcaggtccttagcccactttttgatgggattgtttgtttttttcttactgatttttttgagttcattgtagattctggatattagtcctttgtcagatatatagattgtgaagattttctcctactctgcgggttgtctgttgactctgttgactgttccttttaccgtacaaaagctctttactttaattaggtcccagctatttatctttgtttttgttgcatttgcttttgggttcttggtcacgaaatccttgtctaaaccaatgtctagaaaggtttttctaatattatcttctagaatttttatagtttcaggtcttaggtttaagtctttaatccatcttgagtgaatttttgtatgagagatgaagatccagtttattcycctacatgtggctagccaattatcccagcatcgtttattgaaagggtgtcctttccctacttcatgtttttgtttgctttgtcgaagatcagttggttgtaagtatttgagtttatttctgggttctctattctcttccattggtctatatgcctgtttttataccagtatcatgctgttttggtagctatggccttatagtatagtttgaaatcagatagtgagatacctccagatttgttctttttgcttagtcttgctttggctatgcaggctcttttttggttccatatgcattttagaattcttttttctaattctgtgaagaatgatggtggcattttgatggggattgcattgaatttgtagattgcttttggcagtatgatcattttcacaatattgattcgacccatccatgagcatgggatgtgtttccatttgtttgtttcatctatgatttctttcagcagtgttttgtagttttccttgtagagttctttcsactccttggttaggtatattcctaagtatttttatttttttgcagctattgtaaaaggggttgagttcttgatttgattctctgcttggtcattgttggtgtatagaagagctactgattggtgtacattaatcttgtatctggaaactttgctgaattttttttatcagttccaggacctttctggaggagtccttagggttttcaaggtaaacgattgtattgtcagcagtgacagtttgacttcctctttagcgatacggatgctctcctttctttcttccttccttccttcattccctccctccctaccytctctttytctttctctctttytctctttctttctttctttctttctttctttctttctttctttctttctttctttctttctttcttctctctctctctctctctttctctttctccctctctctctctctctctttctttctcttgtctgattgttctggctaggacttccagtactatgttgaagaggagtggtgggagtgggcatccttgtcttgttccagttccgagagggaatgctttcagcttttccccattcagtattatgttggctgtgtgtttgttatagatggcctttattacattaaggtatgtcccttgtatgccgattttgctgagagttttaatcataaggggatgctagattttgttgaatactttttctgcatctattgagattatcatgtgatttttgtttttaattctgtttatgtggtgtatcacatttattgacttgcgtatattaaaccatccctgcatccctgttatgaaacccacctgatgttcgtggattatctttttgatatgttgttggatttggttagctagtattttgttaaggattttagcatctatgttcatcaaggatatcggtctgtagttttctttttcggttgcatcctttcctggttttggttttagggtgatgctggcttcatagaatgagttagggagggttccttctttctctatcttgtggaatagtgtgaaaagtattggtaccaattcttctttgaatgtctggtagaattctgctgtgaatccagatgcaagtccttagtcaggtaggtagtttgcaaatattgtctcctagcctgtagcatgtcttttcatcttcttaacagtgtctttgaaagggcaaaaatttttaattttgatcaagttcaactttttgatttttgtcctttatggattatgttttagtgtcaagtctaagaactttttgccaagctctaattttcaaagattttttttttacttttctaaaagttttatagtttcacattctacatttaattctgtagtccattttgagttcattttttgcataaggtatgaggttcatattttgcctatggatgccaattactctagcatcttttttttttttctcactctgtctcccagtctgtagtgcagtggcttgatcttggatcactgcaacctccaccttccaggttcaagcaattctcctgcctcagcctcctgagtagctggcactacaggtatgtgccaccatgcccagatagttatttgtatttttagtacagatggggtttaccatgttggccaggatggtctcaaactcctgatctcaagttatccacctgcctcggcctcccaaagtgctggaattacaggcgcgatccactatgcctggcctactctagcatcttttgttgaaaaacctacccttcctgcattgaattgcttttgtatctttgtcaaaattatcagttgagcatatatatgtgggtctacttctgggttctctattttgtcccattgatctatgtgtttgtctttctgccaataccacacagtcttgacgactacagccaagttttgggatctcgtagactgattcctcccactttattcttttttcaaaattgatttagttattttaagttctttgcctttccatataagttttggaataagtttgtctacacctacaaatattcttgctgagactttgrttggaattgcattaaactgatatgccagttttgggagaattgatatttttacattgtggagtcttccaatccatgaacatgatatgtttctccacttagttcttcttttatttctttcatcaacattgtaaatggcaatgtgctttcatttggtttacacatgttcattgttagcatgtagaaatgctattgacttttttttgtatgttgatctggaatcctgcaaccttgctgaactcacttattagttctaagattgtttttaaattttttagtagtttctctgtagatatcatgtcatctcaaaatagggacaattttatttattccttttcagtctatatgcttttcatttattttcttgccttattgcactggctagaacttccaatactatgtcaaacaagagtagtgaaagaggacatccttgccttgttccccatcttaaggaaaagcattcagtctttcacattaagtatgacattagctgtaaggtttttgtagatgccctttatcaagttgaggaactcctctctattcctgagagtgtttatcatgaacaagtgctggattttgtcaaatgctttctcatgtcaactgatataatcacataattttttatttttcaggcagttaatatggtgaattatattgattgttttgaaaatattgaatcagccttggacacctagaataaataccacttggttttgatatataagtctttttatatagtgctagatttgatttgttgaagatttttgtgtttaaggtcatgagagatactggtctatacttttcttgtagtatctttggctggttttggtatcagagtaaacctgtcctcataaattgagttgtgaagtgttccctcctcttttatcttctggaagatattgtaaaattagtgttaattcttcttttaatatttggtagaattcttcattgagaattctacattagagaattgtactctctaagtacattgagtaccacatcatagggtggtgtaatttttgcttcaamcatcaagtatgatttaagagactccaaggtatcctggcctggagatgtgtttttcaggaaattttaaattatgaattcaaataaaaaatatgaataattaaattttgaaatttaattaaaattattagtagttttgtggttgtaagattattcagattgcccacttcatcttgattgagctttaatagtttgtaattttcatagaattggtcaatttctttctagtttttaaatatattagtctaaagttgtttgtagtagacccttatccttttagtagctgcagtgtttgtagtgatatcccatttcattcctgatgttggtgttttgtgtcttctctcttttatctttgttagtcttgttcgaggtttatccattttattgatattttccaaagaaccagtttttcgttcatcagtttttctgtggtttttgttttcaggttcatagagttctgcacttttttttttattatttcctttcctgtgcttgataaggttctttgttcttctttttctagtttcttgagatgggagcatagacgattcatttaagatctttcctcttttctaaagtagcatttagtgctatcaatttctctctccacattgctttagctgcagccacacattttgatatattgttatctagtcattacattatattcaccattatagtagtgtatttgttctcttttattccttctgctccttgtttcatttttcttacctttttgtggataacttgaacatttttcagaattccattttggcttatcataattttaaaatagtttttcttagttcttgtgtaaatacacatatataatttatcacaatctatgagtatgaatgccttaccattttgagtgatatgtagaaatcttacttccattttggaccttttagcctccttacttttaaaatataattgtcttaagtatatcttctaagtgcattgagtaccacatcatatggtggtgaaatttttgcttcaaccatcaagaatgatttaagagactcctgagaaggatagtctattatttttatccatttcattgtcctttcctttctgaagttccaaactttcttctgttatcatctccctttcctttctgtttggagaacatccttcagccattctttaagggtaaatatgtgagtgacaaaatctcttagttttccttcatcagagaaygccattatttccacttttctcctgaaggatactttcaccaaatagatgacttgtgattgacagctatttcctttcagcacttgaaaaatgtgccacttccttctggcttccatggttcctgataaaaaaaacctgctgtcctttgaactggtgttccctatagataatacattatttctctctggctgttttcaagatgtttttctttcttttttagttttcagaagtttaactatgaggtatcttggcatggatttccttgggttcatctgagttgagattcactcagcttcttgaatatgtaggtttatgtcttttgcaaaattcagaaattttcagctgttatttcttcaagccaaggtgacttttaagcacattgtatatttgagaaacattgctctggaggggggttgagagatccaaggacttctcaaattgtatgcagaatgctgttaagtgtccacagctttcattagattctcaaaagactccatgaccctcaccatacattttataaaagaattggtttatggccttattgagttgttttttgttttcttggttaaaatcagtaaaagcaaacaaacaaacacaaaaagtagttagtattcttttctttytttgtaccacatctgttgaattcctgtttctcaaagattttcctgacaattttggaaaatacgatgactcaggtaaatgttttccaagtgcctaatatgtgccagacaaatatttttattgttttccatagttaatgagaaggagaagaatttaaaacaattaatatcatttgggtttatgaaaagttcttggtaaataagtgctagagtaaaattggctgcttttcagtgtgactttcccctttaaaatctgttccttactgctctgagctggatacaccagcgatcaaattacatccctgaaagtataatttcatacaccgaaaacatgtcattacacagtgggccgcttgtcatcactctggcttgctttgcacagttggtagtccggcactcacggttcccccaagcaggcttgtccctggctcaactgctctagctgattcctccagccagcagaccctcacctcctttgtcaccccttattcctggactaacttttgctcatcttccagaactcagcttgggaagcaccacctctgggaagccttcagtctcttttctccaagcattgagttgagtgtgcctccagggtcactcatgcctgccagaacatcacgctgtatattaattgcctaattgtctctcctgtcagatagtcagacccttggaaactgtgactgggtcttgatttgctttcgtgcccccagtacttttgtaagtataatatsacatgtgtttacgcactatctccagttagagttcacgccaccagctgactgactgactgagcctttcatccatattttcattaatgtcattaagtatctgttgagggctgggcacagaggttcatgcctgtaatcccagcactttgggaggccgaggtgggcggatcacttgaggtcaggagttcaagaccagcccagccaacaaggtgaaacgctgtctctactaaaaatacaaaacttagctgggcatggtgatgggcgcctgtaatcccagctactcaggaggctgaggcagaagaatcgcttgaacccgggagggggaggttgcagtgagctgagatagcaccactgcagtacagcctggacaaaagagcaagactccatcacaaaaataaaaataaaattttaaaaagtacctgttgagctcctttatatataggtgtggcgaccagatattcagttcttcccaagcaggtttaatctttcctcacaagcatctgtttattaattcactttagactttttctgagaattggtataaaggttattggtcttttgctagaattcctatctttccgttttggggaaatatggataacaccgacctctgccattttccttctttgtcttactactggatcttatgaaccctttattattacatttacatgtatagctctgtctttcctattaggctgtaataagctccttgggcagggagtgtatcttattcaacccagagtctccagggaccggtgcaaggtggcattccatgagtgctggtggaaagaaatttgatgttagatcatcacagctatatggttgcttatgattggaacatatgtttcctcatcgtctccatacctttacttcctagttatcttttatccctcattctaagctaccgtgaactcttttttggaaaggagaaatgggtaatgcaacacattttaatgcattttttattcctcccaggtactatcttggtcgtcggatgtttattgttatttctgagccagacatgatcaagcaggtgttggttgagaacttcagtaactttaccaacagaatggtaygtagttttctttccgcatatagatggatggggaattgttctcagatggagacactgcatgtcagatccaatggggatgcaatcaggcctctgatcaggtttatgtcagttccactcaaaactaagctcctcagtgaactcggtttttcaaaagagatctatgggactggtacaaaagagtaacatttacatttaagaaatgcttcaagaaagctaaagctcaagggaagctgaggctattaaaaatgctaaaaccaagagggttttctaaagctgggttcaaagccgggggaatccagagggcacaggccaagtgactgacggagaatgagctaggctaataaatattagttggaaagcaaaattttgaggttcttgcacttacatctttcccagaaagtataagagtattaaggctggaaagggaagtcaagcaaaattaggagagaaatttgtcccctagtaagagaaggaaactttaagagggctcctttacattaggtcaagtctccagcctacatgcatgtacatatccctttgtttttggaaagtaaatgtcctactatttatctttgatgagaaatcccaaaggatgggcgaggtgacagaaaatggcagagatcaggccaggcacagtggctcatacctgtagtccccacactttgggaggccaaggagggtggattgcttgagttcaggagttcgagaccagcctggccaacttggcgaaactctgtccctacaaaattacaaaaattagccgggtgtggtggcacacatctgtagtcccagctacttgggaggctgagacatgagaattgcttgaacgcttgaatctgggaggctgggagtgggaggggctccagtgagctgagatcgcgccactgcactccagcctgggcgacagagacgctgtctcaaaaaaattaaataaataaataaaagaaataaagaatgaaaaaatggcagatatcagtgctaaccattttccaaaaatagggagataggcattctagcagagaagaccagtaacctttacgttgattcttggaaaaagtctaaagtgaattaataaacatgtttgtgagaactcagagaatcaccttgccaaccatttttggggggttccaattagacctcacttttcattcttttagggaagtacgtattcattcttttgttgattatgtggcaaactttttcatacctrccatatgccaggcactgtgtaggtgctgactgtaaagagacagtgtccctcgaggaactctcggtttagtgagggaggcagacaaggaaagggaccagcacaatgcagtgtggtgagtgctcctgaggtggggagcccaggccaccaggatgcagacagaggaaagcttattgggtgtgaggtgcttggggctgagtcttaaagaaattagagaaagtccccctscctgtgttccgaactaggtgagccatccagagtgtgtccttgtcatcgcaagagcttatgagatgagtacaattatcatctctattttatagacaaagaaactaaggttcagagaggctaaatgatcaaccctggtaacatggcttaacacgaggaagagcagggattcatgtgccatctctcaacttaagtctagagctctttttactgccaaagctgtgacagctgcctcagtgacatttcaggatgtcaaggttgagtggagtaattggccactcacccaaaatttgctcatcttcttccagccccagagcatcatgcccaactccagacatcacgtggcctctagagggatgtggcctggagggaggcggctggcctgctacctccatcccttcaggatggccgaaggaattgcagaagtttaactgcttctctgctgcctctagattctctttcccaaacactgcattgctatctcctcgctcaaagtcccctggaagccgtctgtcargaaactgattctgattaytaaatgcagctgtagcttgttgctccatcagcctcagcaaggagtgctgattaaagaagttggagaagccaataagtcaaagtgcacggaccaccaagccacatcctggcaagcagtaaaggtactcccaggagcctgtcatagcacttgagactgtctgagcccctaagccatgagacggcacttgccaactggtgtctccatatttcctcccatgataccaggacatgtgaccctgagagctgacctagaagaggtcaatgatttggcctgctaggggcagacatactcaatgcacatgtccaagcaaggaggacacaataatattgccctcagcttygatcaatttatcctccaagccatttgtctgccgtttctaatttctttcaccatcccctcacccacccctccacgcagactaggtccagtgccccaaactccagagtagagttccaattttcgtcctcttccactcagcacaggattaagccttcaggactaagttcaagttccctagacgatatttaagggcccttgtgtcttagatccattgtgtgtgctccaccctgtctctcactgctccccaatacaaatcgtcactccagcctctccctgctcaccctcacctgctctggagagacctgacctctgccttgctcacgctgacactgcctcagaattgaaggcagtgtaacagtggggctcatattgattatgacgtgagcttgagcacatatctttttttttttttttttggagacacggtcttgctctgtcacccaggctggagttcagtggtgtgatcagagctcactgcagcctcaaactcctgggcccaagtgatcctcccacctcagcctcctaggtagctgggactgcatgtgtgtgccaccatgcctggctaattttaaaaaaaaaaaatttggcagagatgggggtcttactatgtcgccaaggttagtctcgagctcctggcctcaggtgatcctctcaccttggcctcccaaattgttgggattatagccctgagccactgtacctggccacatttcttaacttaaaaaagagctggggcagctctttttaaaaatatccatggaaagtggagctgaatcaacatgactcagcagaaatggtcacaaccagtggcagaacttcttattcttggcctcctctcaaggcctggagttgggggatatgatccaccttactgggctgtcataaagccacatgggatcatgcatataacctctccctctacacagtacttggcaggtgacacattactgcttctcacaagaaaaccctccacctcttccacacccatccaaactcttgctgttcttcaagacactcctcagatactgcctcctccaggaagccttccctgcctccatccacatgcacytttccccttccctgaactctggcagcgctcaccatgtgtgtcactcgttgtcacagttgatccccttgtgccttccagtatttacagtgaaggaggatatggctttcactctagcttgattattagctctttaaggccaagaactgtatcttgtattttttttaaaccccatgacataaacacatattgactcttcagcatccaatatattcttgttccaactgaatggaatttccatcaacttgacattcctcccagaagaatgaggtattacttgaacctggagttgcaatatagtcttcttcgtctcggtcattcacaaacacgtaaaaagacccatcatagataagatctccaggaaatcccagtgtttatagttttccatctgggaatgcatccacttatgtgtagctttgtttatggtctttaagccaattccatatcgatggtaaaacaacccttagtgactcaattttttaaaaaacagtctttaaagtgggattttctcacaggtttttgaaagtcaaattaaattgggttctgtggttccctcttatccatatgcttatttatctgctcaaagaactcaaggagattagtgagacgtgatttctccttactgacaccacgttgccttccctctaataggccatgtttacttaagcgttcagcaattcagctttattatacattcactcggtaaacattaaatgcttactccatgcaggctgctaccaaacggtcccttgtgatacagaaaatacctcggcatattagtttgataaattaagtgaaaaggaatttaaataatgcatgctctcattctccaacagggagagcccatgtctgctcacaaattcaggcttgagttacgttgagttttgtccctggacagcctggtggagaagggccctgatttgggaagctggatttagctctgaaatttgacatgagccgtaagcatcccatgagggatccatagagcatattcactggaggtgggggtgatgcaacagggagctccctgacatacaacaacattgaacaaatgtgtgaattcaaatatcatcctgtgaaatattcttttccaaactccagaacactggctggagcagactgtgggttggatccggagcggcagttcttaatgtcatgctttcccattcacagtttttgggcctctggagtctgtgcaatgtctctgcttcatcttgctcattttccacgtggaccttgtaggtctctatcaatgtcctcagtgcttcctgaaactgctccatgatggtgcaaccacagcttatcattaaacccaaatcaatcttcttggcacttatagaagctcagtcgtcctggtacatcaggactcggatgtttctatttagatattttcaatgagctcttctttgctgtcaggtacggtacctaatgaaaccatagggcagctcttttttaaatatctgtggaaaatggagctgagtccacatgactcagcagaaatggtcacaaccagaggcagaacttcttgttcttggcctcctatcaaggcctagagttagggagctgtgggaagggtgataagaggtaagccagtctttggcccatgttagcttggtctggtcagataggcatgtcagggatgtgtcaaaacactaagcctagtgctttggagatgtgggttctggtctggagtggcagtatggagtgccatctctcaggtcctcatgagcaacacagaggtcacctctccaggcacaggtcgagccacaccactgacacacaagagtcacgtccaaagccatgtgatggacgtggtgggtggttttatcccgaaccatcaatacccggcaccctggctgccccaggttcagcctctcaggggctgcttcactcgctctccacacagctgtgaacattgcaggatgagtcactgtgaaaccacaaactccttggcattggtgaagatgactaaagttataggcaaattagtcactggaaaccttcctgtcctctgtatctgcagcagcctcctatcgaaggaagaaaagagtatgttggctcattgcagagctaattggcaaggaaagctcaattcagggctacaggtgagtcagacgcccttgtgcgggggccacagggacccgcctgctggcatccattgaggagagaggggcccttggcagacttgccataaaaccgccccccttgaactcattcctacacctgtaaccactgacagtttttgaaaactgttcacctggagttcctggttctctttctcttaaatcaaacattgartaaatgaagacactcagatgttcaaacatgtgcatcaagattttacttgtgagagtggttgccatgcatgacctagggaagctctcatggcttcagtcaaaccttgccaactttttttagctgtgcatttcttgagaaaggtcaactcacattacgrgtctacagctctgagcaagggagaagttcttcctgaaagcacaaacagactacagagggcagtgaaaccagaaacacaggtgtgcaacctcatttgcctgcccccgtctctattttgaggcctctttgttttatgtgacctccgtctccttctctgccgcaatcttcttcttataacacccactttcttcttttaatttccccctcttctaagccatagcccagtggtatggcgaaaggtctttgctgtgcataggaaaccctccaatctgaactggaagcttcctgttgcaggatgggctgccccattggaattcccaggtgacagtcgcaatgggatgcctgtcccctgcaggtctcccatttcacctgcttttctaatgtctggacatggctaagtcctagaaaagccagatccatggcattacatttaatcagtacaacacactgagcttcgtttccaacatggtagctaagttttaattctaacatctttaaaagtactgagtgtcttgtgatgccttgggaacacaggaatagtgttaagtggtgttgattctcaatgctcaaatgtacttctctctgccttgcagagatttttctaaaatttcaagaccttgttgaaaatgatttcatatttttgtgtcttactagactcttggttcagcaggaagctatctttatatatttttttaacaaaaagaaattagtaaaagcttgctctgatatttatgccatatttccctaacttttgtcgtggcagaagtagaaataagtgtgtaaaccaggagattaatatctacaatttaggcatgagaatagagaaataaaccataaaatcaattcttatctctcaatggatatattccagaacattccatggaaatcaagtgactaagtcctgatcctccctgtctttctccgccccaatctccttcttatgacattccctttcttcttcccattttccctcttctaagccatagctcagtagtatggtgaaatgtctttgattttagtttaaagaaatgaaatcagattccagatttgcwacctcttattagttgtgtggccttcagacaatcctttaacctcctgattctcaatttcctcctgtgtaaaatacattagactagctaatccctaaggtctgtttggtgcccagttcacgtgaccgttggcagccacagggagccacggagtcccaccagcgtcccatagagccacttggagcttcaggtacaaggaacaagcccctcktaggccccctcaggaaaatttattctcgcagccaagcatgtcaagtgcaatatcaggaacacccttgtccttcttgaacactgcttctggccagaaactctgctgagatctgttggagagtttcctgcaaagataagagttaacaagcccccagattcccttccccgctcaggaggggccctcactrtcagctttggggctgatagaagcacagttccaagcgcctggcttcctcctcctccccagtggataaaatgctggaactccgtcaggcaggactgccataattagaagaggcccctttccagcagctgaagctgactaggcagatagagcccaaatttgtttttagccaccacatgcccctgagctgacccctcragctgtggacacatctcacaacctcacccggaggccattctctcaggccagtcacactctcccacagagagagcgaagatgatgtcaaatctatggccaccttctaccagcagagggaatgaatgaaaactgacatgtagaagagtaagaccactactgttttcatttttggtattttttttttacattttaatttttttatactctatttttagtaaaagggacacctttactatttcaaaccaccaaaatataagccctatttggttcaaatctttgtacagccagatagcaatagatataaattgacaatggcctcaagtatagaatttggggttatacaagtgacagaattcttgagtctcagttgattataatataatgaggggacagtgccaggtctttcacgtctccaggtgggaaggggacaagttgcacgatggctgtcctcatctgtgcctggttgtgtgagaattagaaacaacgtttgtaacagtggtacctagtctttgtgaccgtggtcctctttttgatattaatatttttgcagactagttggcataaacaagttggctctctgtactcacattacaaccactgaggtataacactatctcttggagtccttagaagcacctcgctctgttcagctggcctctcagccttgtgtggctgtttcagaactgttgatcatctgtcaagtcatcccagagatcatctagatcttgagtccatttcttgcatgttccagaacacaagaaaacatttgtggctatagcttcatattctatcatgcctttcatccctttctcccgataatacatgaacccggttacagcagaaatgcattccatgcatttgcaacactctggaaggagccagtggttcttgtgtggctttaccaggccagtcgagaatcactgggctggtgcatgagaaaccttcagtaagtggctgctgtcttcatgcacccatggaatgccgaggtgttggttttcttcaataacctgctcctcagggcagtgtttcctaattgctggagaatgacccaagagttgatgaaataatatgaaaagtactgtgtttgctgtaagatggacaagtattggtgatataggccaccccactcccaccctccattctttgtcttgatagttccagtcccagtacagcacctggcacacagtagttgctccatcattattcacagcataatcacagacaccattcagagcagagcttgtacagccctaaacataaagtgcagcaaacccagctcaagatcattgaagctagcagccattcagctcctgctgtgggatggccagggagggtcagagactgtggtcttgacacattctgtgtggggttcatccacatcttcctaaatgcccaaggcatggctatttgaagcagagcaagtaaagacaacgaggggtccctctgctgggttttctgtccccctctggctgccagcactaatctagcctttgaagaggggcagaaggggcaaagttaaaccacactttcctctcttacctgttgtcacccctctaatgacttttcactttctctgctcaccttctccttcctgcctcttttagaaatgggaaacaaagggcccatagrccctaaaaggggccaccctttgaaggaggagacatgaccacaaatgtcaccctttgatatcctaatgggatccatgttaaaaaaggaagtttttaacctggtctcagaggacacttgcaagagatgccaaggaaggcagtgtgatcatcccaagtcaagcagcctaacrtgagcctgtgagagagaaactgcaatccacccgcaacgtgtggtcatcaaagggcggcaaccccagttaccagcttgagattaaaaacccaaattaaaacagggccaaaggattcctgtcagctcttaacacctctcttaaaatgtgaccactgtctgaaaaccattgtttggctgatgaggtctaacttcattacacatcacagtaggacactccttcctgagaccaggcactgctcccatgagtgcagtaggacagacctcctctgttcctgacgatgataccccaatacagcccgacaagcgtgtgctcaatgaaggttcccagatctttttaatgcgactttttgcaggtcaggttgcttccatcacatgcactgaacaaccaaattttaaacctaaatatgaaaccttgtagttacatctgttgattttcgtcttgttagtgttcatccagcattcaagtctgtcgaaattaaatgtttattattccttagtatttttttaaattgaagtcacttccatacacaaaccttgagtgtaaagctcaatgtattattgtctatgtattcccctatgtgacaccacccagatcaagacacaaacatttccarcactccagagggttccctcatgcctcttctcagtcaacccatccctaccatccagaggaaaccactcctctgacatcaatttgtatagatttctcttttcctgctgttgaacttcatgtaaatgtaaacttacagyatgtatccttttgttctggcatcttttgctcaacataatgtctgtaagagtcatccataccacgtatttagattaatatagccaggtgtggtggctcagtcctgtaattttgcactttgggaggctgaggcaggaagattgcttgagcccaggagttcgagactggcctgggcaacaaagtgagacccctgtctctacaaaaaaaaatttttaaattagccaggccccgtggtgtgtgcctgtggtcccaggtactcaggagactgagggaagaggatgccttgagcccaggaatttgaggctatagtgagctatgatcgtgccactgcactgcagcctggggacagagcaagatcgtgaacatagtttgcatttttcattgctatgtagcattccaatgtatagaaacaccacaatctattcctctgtcaataaacatataggtttccagttttttgctattatgaattaggttgttatatcaacaggcatttatgaacacctaggagcagcatcgctagcccacgagagtaggtgcatggtgggtttttgtacatactgccaaacagttttccaaaggggttgagccaatctatactcccataaagtggagttctagttgttccagccttagccagcactttcatcttgccattatttttcactgtaactattccaggggctgggtagtagtggtatctcaccacagttttaatttgtatttatctggtgaccatgtcattgagaactttttctttttctttttttttttttttccccgagatggagttttgctcttgttgcccaggctggagtgcaatggtgtgatctcagctcactacaacctctgcctcctgggttcaagcgattctcctgcctcagcctcccgtgaagctgggattacggacatgtgccaccatgcccggctaatttttgtatttttagcagagacggagtttctgcatgttggtcaggttggtctygaattcctgacctcaggtgatctgcccaccttcacctcccaaagtgctgggattataggcgtgagccaccgcgcccagccgagaactttttcatatgctctctggccatttgaatagtctcctttttaacaacgtgcctgttgagtctttgccccctcccccacttttattttaaggtgtttgactttttctgattgacttgtttttctttgcatgttctgccttgagtcttttgtcagataaatgtgttgtgaatatcttctcccagtccatggtttgtgtgttattttcttaataatatcctttgataataaagtccaatttatcaaaatcttcttttgtggtattgcttttggtattctctttaagaactcttgccttatatacaaggtcacaaagatattctcttggaatcattatggttctacctctcactattgggactatgatctatctccagttaacttttgtgtatagagtgaagtatggatcaaagctgattttttttctctgtattaatatccaattgccccagtaccattgttgaaaagaccacccattcccccttgaatagcacctttgtcataaatcaagagatcatatgtgtgagtctacttctggactctgtcccatttcattggtctttttgtttatccttgcaccaatatcacactctcttaaatagcatagctttatcattgatcttgaaagatggcagtgtggccaggcacggtggctaacgcctataattttgggaaggccaaggtgggggaattgtttgaggccaggagtttgagaccagcctgggtaacaaaccaagacccagtctctactaaacaaatatatatatatataattagccaggcatggtggcgcatgcctgtagtcccagctactcagaaggctgaggtaagaaaattgcttaagcccaggaggcgtaggttgtagtgagccatgattctgccactgcacttcagcttgagcaacagagcgagaccctgtccgagagagagagagagacgcaagagagagaaacagagagagatggcrgtataaattctcgtggttattctagttcttttggttccatatatctgtttacaggaatcagcttgtcaatttttaaaatgtttaatttttgtgagtatatagtaggtgtatacatttatggggtatatgaaatattttgatacatgcatgtatcatgcatgcatgatacatgcatgcaatgtataataatcacatcagggtaaatggggaatccaccatctcaagcatttttcctttctttgtgttacaaacaatccaattataatcatttatttttttgccctgtcttatggtgctgatctttcggttattttaaaacctgcaattaaattattattgactatagtcaccaaatactaggtcttattcactttttctatttttttccacccattaaccatccccacctccctcgacactctttcactactcttcccagcctctggtaaccatcattctactatctccatgagttcaattgttttactttttagctcctacaaataagtgagaacatgccaattttgtccttctgtgcctggcttatttcgtttaacaaaatgacctccagctctatccatgttgttgcaaatggcaggcttttattcttttttatggctgaattgtactcccattgtatatatgtaccacgttttctttatgcagttgtctgttaatggacacttaggtgcttccaaatttggctcttgtgaatagtgctgcaataaacatgggtgtgcagatatctctttgatatactgatttcctttctttggggtatatacctagcagtgggattactggatcatatggtagctctatttttagtttttttagttttttgaggcgcctccaaactgttctccatagtgattgtcctaatttacatttgcaccaacagtgtatgtgggttcccttttctccacatccttggcagcttgtgttattgcctgtcttttggatataagccattttaaatggggtgagatgatatctcattgtagttttgatttgcatttctctgatgaccagtgatgttgagtaccttttcatatgcctgtttgccatttgtatgtcttttttttttaaactgtcgattcacatcttttgcatgtttttttaataggattattaggtttttttcctgcagagttgtttgagctccttacatattctggttattattcccttgccagatgggtagtttgcaaatacttcctcccagtctgtggcttgtctcttcactttgctgattgtttcctttgctgtgcagaagttttttaacttgatgcaatctcaatcrtccatttttgcgttggttgcctgtgcttgtggggtattactcaagaaatctttgcccagttcaatgtcctagatattttctcaagtgttttcttttagtaatttcatagtttgaggactcagatttaagtctttaatccattttgattcaatttttgtatatggtgagagataggggtctagtttcatcattcttcatatggatatccactttttccagcaccatttattgaagagactgtccttttctcaatatttcttcttggcacctttgtgaaaatgagttcactgtagatgtatagatttgtttgtgggttttctcttctattccattggtctatgtgtctggttttatgctagagccatgctattttagttactatagctctgtcatataattagaagtcaaggattgtgattcctccagttttgttcattttgctcaggatggctttggctattttgggtcttttgtgtttccatacatattttaggattgttttttctatttctgtgaggaatgtcacatagagattgcattgaatctgtagattgttttaggtaatatggacattttaacaatattgattcttccaattcatgagtatggaatatctttccattttttttgtatcttcaatttcttgtatcagtgttttacagtcttcattgtagagatcttttacttcttcagtaaagttaattcctaagtatttcattttatttgtggctattgtaaatgggattgctttcttggcttctttttcagattgttcactgttggcatatagaaatgctactgatttttgtatgttgactttataccctgcaactttactgaattcatttatgagatctaatagcttttcggtggagtctttaggtttttctaaatgtaagatcatatcatctgcaaacaaagataatttgacttcttcctttctaatttggatacgtttatttcattctcttgactgattactctagccaggacttccagtactatgttgaataacagtggtgaaagtgggcatccttgtcatgttccagatcttggaggaaaggttttcagtttttccccattcagtatgatactagctgtgggtctgttgtaaatggcttttatgttgattgatgttccttctatgccttttaggatttttattatgaagggacgttgaattttatcaaatgcttttttagcatcaattgaaatgattatgtggtttttgtccttcattccattgatatgatgtatcacattgattgatttgtatatgttgagccatgcttgcatcccagtgataaatcccacttggtcatgattgatctttttaatgtattgttgaactcagtttgctagtattttgttaacgatttttgcatcagtgttcttcagggatattggcctgtagattttttgtttgttttgttttgttttgtttgatgtgactttgtctggttttggtattagggtatgctggcctcctggagtgactttggaagcattcccttctcctctcttttttggaatagtttgagtagaattggtattaattcttctttaaatgtttgataaaattcagcagtgaagccatggtgtcctgggcttttctttgctgggagactttttattacggctttgatttcattacttgttattgatctgttcaggctttggattagtgattcaatcttgacaggttgtatgtgtctaggaatttatttcttctagattttccaatttattggcatacagttgcccatagtagctgctaatgatcctttgagtatcagttataacatctcttttttcatctctgattttatttacttgagccttctttctttttttcttagtctggctaaaggtttgtcaattttgtttatcttttcaaaaaaccaactttttattttgtcgatcttttgtattgtttccttcatttcaatttcatttatttctgctgtgatctttattctttttttttctactaactttggctttagctcctgcttttttagttctctaagatgtatcattaggttgtttatttgaattttttctacttttttgctgtaggcacttataactataaattttcttcctagtactgcttttgccatatcccattagttttggtacattgtgtttccattataatttgtttccagaaatttttcaatttccctcttaatctcttcattggcacaatggtcattcaggagcattgtttaatttccaattaaacaattggaaattgtatagtttccaaaattcctcttcttattgatttctagggtttcttttttttgttttttgtttgtttgttttttgtttcttgagacagtctcactctgtcacccagactggagtgcagtggcatgatctcagctcactgcaacctccacctcttgggttcaagcaattctcatgcctcaaccacccaagtagctgggattacaggcgtgcaccaccacgcccggctattttttttttttttttccgtacagacaggatttcaccatgttagccaggctggtctcaaactcctggcctcaagtgctctgcctgcctcagccaaagtcctgggattacaggcatgaaaatagacacacttttgtgtatctattgtatgtttttagatttgaagttatcatatcttgcaaataatcttgtaaaccattattttaaactgacaacttaacactgattgcataaacaaacaaaaataaaactaataaaaactctacgctttaacataatcttcccactttttaactttttcttgtttatatcttattgtactgtctatatcttgaaaagttgttgtagttattattttcaattggttaatcttttcatctttctacttaagatatgagtagtttacataacacaactacagtactataataatcttgctaagttttgaagaattgacatcatgacaatgttgaattttccaaactatgaatgtggaacctctatatatttaggtattttaaatttatcttagcaatattttgtagttccagactacaggtcttttgtacatctttagtcaaatgtttttgtaggtatttaatagttttactgttattgtaagttatatttttaaaatttcatttttcagtagtttgttgcccatgtgtagaaataaatttttgtatattaaatttgtatccaacaatatttttaagctcaatattgaatctagaagtttatttatagagatttctcaaattttctatgttagacaatcatgccatctacaaataaatagagttttacttcttccattccaatttttacaaattttatttatttttcttgccttattgacctctctatgatgtcaaatagaagtgtaatagtggacatagttgtcttgtttccagcctcagaaagtgttaactatttcactgtttaatataatgttaactgcaggtgtttttgtaaatgtcatttttaggtgaaggaagtctccttatattgatagttcactgaaagttgttattatgaatgggtgtcagtttttatcaattttcttctgcatctcttgagattgtatatgtttttctgttttattctgttaatgcaacaagttacattgattttcaaagttgcattcttggaataagtcccacttggtcttaatgaattattcttgtaatttatcactgagctatattacctaatattttgtttacgacttttgtgtctatgttcacgagtgacattggcttataatttttctttcttgtaagtctttatctggtttggggctcagtttatgctggctcatgagatgatccagattaatgttaaatcgtgactctgtgcacattaactattctcagctgtgatttctgcaaatcagtagttcattatgaaaataacaaataaaatgttcgattcgactgggataagtgtagaaatctgtgggtctctatttgattccagattaatagagttttatttgtctttggtgttctgacagccatgaaaccaccaacccgttgcttctcctctttccccataagaatgtccttggaaatcacaaaatgttttgtttcccacatctatagatctgtccctatgtgggggaaagaaaagaatgagtaaacattacttctcagtgaacttgttcctaaggatcacttttttaaaaaatcttttttaaatgggagtaagctgttatctgcacaaagcccttggggtgaagtccagtcaacagggcttccctyaggagatgttctctaaactgtgttcatgaaagtgaataagagttagcaggcaaaggagaaagggggttggagagggatctagagtttcagagaaagagaaaaacagctcacgagaagkaccacaccctagagagatgacatggtcaagggtctaacggaataatgcgacatcatctcaacactatgtgccaaggactgtcctgaaagctgtgtcataaataaagttttggtgccgcaaaagaaatagcactcaaatataaaattttctttttaattctcagcaaggcaagttacttctatagaagggtgcgcccttacagatggagcaatggtgagcgcacacttggacaagggaggggaaggggttcttatccctgacgcacgtggcccctgctgttctgtcgttcccctattggctggggttagaccacacaggctaaactaattccgattggctaatttatgtgatggagtgatggctaatttagtgatggagtgggtggtttcgtgggaaaaatggctatgacagagcatgtaataggaatgagtcagggtggagcaggtgattggaatgagtcagggtggagcaggtaatcgaaaaaggttgctttatgaggaagttaagtttaaaagtagaaggcaaaaaattgaacatactgacatattgattctttgaaaagaaatttagaactcatatctaacagctataaatgtattaactgcattcatcattccgactgctcagtccaaaacccttggagtcatccttgactcctgtctttctctctcccacctcatatccaatccatcaggaaatcctgttggctctaccttcaaagcatgccaggctgatcatttctcccggtatctgtgtccagctccctggcctgagcctccacccccgctctctcctggccactgtgcttcctcctgacggcgctccctgcctccactctggctcctcacagttgattctcaacaccaaacagcgagattctttaaaacagaagtcagctcaagatatgtctctgttcaaaactctgctatgactacctgtgtcttgtggagtacaaatcctaccaagattctggaggccctccacacacaggcccccatgccctctctggcctgcctccatccctcccctccagccgcgccacatccttaagggtcctcacgcacatgatgcctttgctgtaatggttcccatgcccaccaaacccccagctccttcaaggctttgcactaatctcacctatgcaggagcccagtgccaactgaccaatttaataacacacctcgccccatcccactgtaccgtccagtgtatttctcatgcttattgtccaccttctcccactagaatgcaagctctgtgaggacacggagcttcattttgttcacagaggtatcctcagcacctaaatcatggcctagcacataccaggcactgaataaatatttgtgaagtgagtgaagcctcacaactatcctaagaggtcggtagcgttattatccccattttacagattgagaaactgtagagaggtcaaaccagagaggtcagctctcaaagtcacatggagccaatatttgaacccaggcatctgactctagaggcaatgttcttaaccactgcattatcctggcaagcccaaagtagcaaatgcaacccgagcttccagaaggccctgtgacttcagactatataagggattgggaagttaaggcactccttcaggctttgtgttcagaaaggggtggggaactggccagcacataccaggcctcataaaacaagttagggagtttgcaccaggatagggctagatttgtctttagaaagatcccactgactacagggtggagtacggatgggtgtgacaaggctgcgggcagggaaatcagttaggggctgagataatggtgacctcagccagggtggcagctgtggggatggaaagagttggccaaagagagatttaataattgtgactgacaggattgtagttgagagagagagaacwactcctaggtttggggtttgggttagttttggtttttcaagcttttttgactatgatctacagtaagaaacacattcacattttgatacagaatacacacacacacatacacacatacacacgcatacatgtacatacacacatacacacacatgcatacacacacacacatatcttgaacaagttcaataaccacagaatactttccctgacgttaaatgctcctctgtgtttcctaatcttgtctatctcttgtctctttctctcctttttttaaatgctggttgccactcatgacattgatttcatgactgatcatggcttgcagtctggaagcccttgaccagagagtgattggaggcttgggacacagctaggctgacagacaggagcctcgaaagctgtgtccctggacctcctttctgcagagtccccttcctgcatgacatacacagtctggctcccatcacacttaccagtctcgttactcattgaattagtccattttcacactgctgataaagacatacctgagactggcaatttacaaaagaaaggggtaatggactcacagttccacgtggctggggaggcctaccaaacatggcagaaggtgaaaggcacgcctcacatggcagcagacaagagaagaggacctgtgcagggaaactcccctttataaaaccatcagatcttgtaagacttattcactaccacgagaacaacataggaaagacgtgaccccaygattcaatttcctcccaccaggtccctcccaccacacgtgggaattgtgggagctacaattcaagatgagatgtgggtggggacacaaccaaaccatatcactcattcctttggggaaaatcctttgtctctttcaaggcatctctcagtaagtctcatcaatgaatatatgtggacaagcaggaggtgtggaggggtcatggaagctattgtttaataggcacagagtttcacttttgtaagatgcgaaaagttctgtggaggaatgctggtgatagtagcacaaccatgtgagtgtacttaataccaccaaactgtactcttaaaaattattaagatggggcacctgtagtcccagctacttgggaggctgagacaggagaatggagtgaacccaggaggcggagcttgcagtgatccaagatcgcaccattgcactccagcctgggcaacagagcgagactccatctcaaaaaaaaaaaaaaaaaaaaggttaagatggtggattttatgttacatgtattttgccacaattttttaaatcaatgtgtaggcaaactaatagaaaaaagagtgtctggagtggctttccagacatgaagtctcagggttgaaagagtccttggaaggcttttagaccaaacccctctgcatgctcaagccttgggtacaggatttctaagaagtggaacagtctccaggggtgtggagctcatcgctcaaggcaggttatcttatctgaataattttgtctgttgactattgggatagttctccttcagatgagctgaaattttctccatagcttcctctattaaacccaattccacttctcagggtcacaaaaaaaaaaacaaaacctaaattccctctcccatgcagtatgtattcaataaatatttattaggcatatgcctaagtaccactgtctgatcttccaaatcttctcttttccagttaaaaattccaaatctgacaactatttcttaaatgacatgattcaatgtccccttaccatctgactgctcttttgaaatcatcaatttcctcttattgtgggacatctataaacaaaaagaggccaggcacagtggctcatgcctgtaatcccagcactttgggagaccaaggtgggaggatctcttgaggctaggagttcaagaccagcctggtcaacatagtgagacaccatctctacaaaaaaacttcaaaattagctgacatggtggcatgtacctctagtcccagctactcaggagactgagagggtaggatcgcttgagtccagaagtttggggttccagtgagccacgatcacaccaatgcactaccgcctgggtgacagagcaagaccctgtttcaaaaaaaataaataaaatgttttcagaaataaaaacattacaataatcaatagccccaaatgatttcatcaaaaaatgggagattctaatggaatttccaggcccaagtgagcacagtgtcatggcatgctggtgagaaagatatgtgaaggccatgctgacatattgcaaggaggactacatttgtctttcaggtgcaagacaaaaaatagtgtaaattcacccttaagtcttaaggataggtacgagatccaatcagccttcactcttatctctaatttattctgtctcatcagaaccagaaaacatcacygcactttccttggaggtaagtgctttattccatgtagtgtgccacaggactgcatcttgccactacataaatacacataatatatgatttcctccttcaactctggaacctaaacaaatggattatgttccccaaattccataaagccataattctgttgagtggccatggcgctcccaaagaatttctttctaaatatagagaggtattcctctgcagaaaaaaatatcccagcatcttggttctaatatataattaactcctctctagatactttgcagttacgttttatggcttattttgagtgttcatattttatcagaaaattataattttcctctaaataggagtttttacaaggcttttgaattctgatgactggcttcatgtttcagctataattaaaacagtgaaatgaaatagcatcaccatgcatcacatgtggttctgagactgcttggtcccccaaccgcctgtctccccacaccccgcaacctgcaggctggggacactctgaccaatggtgggggctccagttttgaccacttagtgggacagctggttttagaaagaaacagaatggcctgagaagaagggatgaggagaccaaagtcctcacctcggagaagcctcccaaatatgtcccccaccgatgtcccaccttgccccattttccttccaggaaaatatactttctccaagaaatacactttccctccaggaaaattcactttccatctagttgttagcttatgagcttactctctgcttcccctctagactgccaactccatgagggccaatgcaaagtcttttttttttcttttgttttttttgagatgaagtttcattcttgtcccccaggctggagtgcagttgtgtgatctcggctcactgcaacctccgtctcccaggttcaagtgattcttctgcctcaacctctcaagtagctgggattacaggtgcctgccaccacgcctggctaatttttgtattttagtagagacggagtttcaccatgttggccaggctggtctcaaactcctgacctcaggtgatccacccgcctcagcctcccaaagtgctgagattacaggcgtgagccaccatgcctggccgcaaagtctttttcattcaacatggtatagacaacttcttgaaccccgtattagtttgctaggctactataccaaccaaccataggctgggggtttaaacaatagaaattgcttttcccacagtgctggagatcagaagcctgaagtcaaggtgtcagcagtgttggtttctccggaagcctctctctttggcttgtgcatggctgtcttctccctatatcctcacatggtcttccctttgtgtgtgtctgtgtcccaatctcctcttctaataagcacaccagtcatgttggattagggcccaccctaatgaccttattttaccttaattacctctttttttgagacggagtcttgctctgttgcctaggctggagtgcagtggcgcaatctcagctcactgcaacctccgcctcctgggtttgagcaattctccctgcctcagcctcccaagtagctgggattacaggcacccactaccacacctagctaatttttgtatttttagtagagagggcatttcgccatgttgaccaggctggtctcgaactcctgacctcaggtgatccacccaccttggcctcccagcgtgctgggattataggcgtgagccaccactctcagccttaattacctcttcaaagaccttatctccaaatacagccatccctcagtagctcgtgggataggttccgggacccacccttgctcaggacaccaaaatttgtggatgcttaagtttctgacataaaatggcatagtatttgcatataacctatgtacatccttctgtatgctttaaatcagctctggattacttataatacctcatacaatgcctacacatcactttatgtacatggattcaatgtagttctctggacagagcaaattcaagttttgctttttggaacttggtggaattttttctgaatatttttgattcagaattggttgaatccacagatgcagaacgcccagatatagaaggctgactgcacagtcacattccgaggttcttggggtcaggatttaaacatatgaagtttggggtggggggccgaattcatcccataacacagtattaggctatcaaccactgtttgctgactgagaaaaaaatgaatgaccaatagaacacagaaacattatggcaggcatgctccyggaagcagttctcctrgcacacgcttctgaaggcctttcctttttcccccttccctctccctccacccatacaagggtccagacgagtgagtcttctgtcaacttcgggtccaacctaaccaatccagtcacacaaaaccctgtgccatgaacttcagacatgatactaattcccaggaaagactaggccatctccaggaagccttccttgtttgtcttcagggaacccctgctcagtagggggactgcagaacacacagaagccattgagttgtctctatgatgatgaccacatcgcagcagggtacagctgagccaccagagcttgcccatctgctccctctgggccccgccatgattctttctatcactgcctgtaagcctttatagtcttcctctctctccttgcaagagaaacctcctaacttgttggccactgatggactttaaccagggtgtttgtcatggacctgtattgccaccaaggtggctttggctccctgagtcctgaccctctgcttrttacttcccaacaggcgtcgggtttggagttcaagtcrgtagccgacagcgttctgtttttacgtgacaaaagatgggaagaggtcagaggtgccctgatgtctgctttcagtcctgaaaagctgaacgaggtaagacatgagaaatgcaaactctcttctcttacggagcaggtttcttctctccaaatcgtgatgagagccagttcatgttgcatcacttgcccaggtgacacatcaaaatgcctttcccactgggaccttcagacctctctgttatgcagaaagcacgggactctgtgttgagcgtctttcgtctctccagcctcccatatccccacttgccataaatgaactgtgagtcaacaagtacacagggcattcgcctgtgtccagagacagagcttgaggtgctttgggggccccaggagacaactgcaacagtgtctgttggactgtcatgcataatggatcacctagggatctggctacaaagcaggctctgattcaagagggccagggtggcctaagaatctgcatttataacacccggccaggtaatttcgttgttactggacaatgaaccacactttacatagcaagaaactagagaacagcatgaaacaaaggtgacctaccaatcaagtcttaaatagggaggtgattgcagtgaatgactggggaggagtgggcgatcatgtcaggcagggacacccaggttaacctctaggccaagttcaagggaagggcaggctccacaggatgctaccagctctctaaggccctggacactctcctttccctactgagtgactcactctttcctatcagctgtgcacccaaaaccgggtgtttgtacagcctccagaccaatttctcacacaacagatcctgactgctgtgttttgtatctaagcctgacagccccctcaattgctggtctggctttggtgtttgctgttctgaattgtgcaaccacaagggagagagaacttgagcccttatgatgtgaaggggctaaggggcttctttagttccagtctcaggtacacaggcatctctagagcaagggagcttccaaagcttggcttgagtgccctgggcttctgccatccaccctgtctggatgttccagagtagcctgtcttcagttcaataaaaatgaaagctacttttagcttaagctcaagatgctcatccatatggtcctgattgaattcctataaatcttctgaagtcccccagaagaggagggggttccacacctcattatatccaattaaactcactcagaagctagtgatccccccatttttatgaggttttgatttgcatttccatgggtagctgttggtgtttgggggcagagcctgtctctgtatgcagcacctgctcacactcacacagctcagagtcaggtaccaagggttgcctgtttagactaacayactgcctcttcaccacattcctgcgagataaataccatcatccttattattaccatcccattttacagaggaggaaactaggcacggagagattaagtagcgtgctccaagtctcatagctagtaagcagcagagccaaaatcagaatccagctccggagcgctcttcacctctctgcctgactgcttgctacctccatgtgattttccagtggtgctcggaggccacgtaggactgtgccaggggctgtctggaggatgcaggaaggggaagtgtagcaaatggggcctcggtggaaagctrgggggygggggagggtcagaagcaaaacttctctattttctgcctaagtttggaaccaactgaggtatggaaagaggttttaggcaaaggaaataaaattttctcttatcttactggtaaagctgtttgaaaaatagagtccccatctgatcacatgggcttgctatgctaatacttcacccagaatgggacaattgcaggggggtggcagatgccatcggggctggcccgcggcccacatgtgctcarttccttcctccaagactgggtctgatacagtgtagacagcaggagatggagagtgacttagatgcagcggttggccagtggggcccaccgggatcacttggggggctttgaaaactgttgctgcctgggtcccacacctagaaattctcattcgcttggtttgctttgggatgcagcctgggtttgaggatatttttttcaggctccccaggtgattgtcacgtaaagccagtattgggaaccaccaccagtagaagttccccacaaggacatgagaggaaaggggcacctgcttccactgcaacaattagccctgctcacattgatctctgttatctattgaggattcacaggagaatgtgaaggaagggcctgcatcttaaagctagaaaccactgctctaaaccatgtagactagctgcctggagtgtgcccctttatcacatccagccactaaaaggttgagtcagccaagagaagaccgggggaagagaggagaggtaggtgagcctagggctggcatcactagcgtatatgtctgtattcaaaagcaatggcttcatggcactatagaagtagaaagaacctcatgtgtgaaaaagaaattggtaaagagtatctgagaaaagaagaaaagagaaagaagaaaaggaagcaaggaaaggaaaataaggtttagcagtcctgggctatgattctttgataaggaattttatcatggtctagattcctttaaccccttacaggggatactccagaaagtgacacattgtcgtttcccaagcaaatccagtgctcctggagtccagtcttctccctctagtccagaaatcaaatgcatagtgcctgaattaattgcagaaaatagagttcctcaatatgtccacggcattaagatgccaagagaagccaggcaaggtggctcacgcctgtaatcccagcactttgggaggccgaagcgggtggatcacctgaggtcaggagttcaagaccagcttgatcaacatggtgaaaccctgtctctactaagaatacaaaaagtagccagtgtggtggcaggcacctgtaaccccagctactcaggaccctgaggcaggagaatcgcttgaatccaggaggcagaggttgcagtaagccaagatcataccactgcactctagccttggtgacagagtaagactccagactccatctcaaaaaaaaaaaaaaaaaaaaaaagccaagaggtagagagagatttcatagagcccattatttaccatacactatcaataaccttgaaattcccttgaaaggcatttttttctactccatatagttcaatttaggttcttgggtttgcgtttgaaaggattccatcccagaggcaggagaagttaactttttccccacctctggggattttagacctggcgagttgaagtttactggaaggcccctaaggagacccttcaagaagaagttggctgtgcagatggcactcaggtgggagggggaagaaagatggtcttcaaaacacagagacgtgtagcatatgtgttagatatggttctggggagaaccatatttaagggaggagcggaggagaaacctataaagaagactcaggaagaacagcctgaaatggaaaccagcagaatgtggaaggggaaagcatttcaaagaggaaggagcagccagaggtgttaaatgctgctcacatggaaagaaacacgaggacgaaaaagtgcacagcaaagataatatttctgaaacgtgaaaccaatgtatgtctgtttcatgctccatagatcgtgttccctgtaattttcccgcacccgcggaatcaatggcaccagtgggtgctcctgaaggtgcctctgaggaagacagtaggtgccatccagaacaaggaagtagttgcttgattttgaactgtacgttagcaagctttattaggagaggaaagagttttcctaattccaaaagcagctcccctttgcatatgaagagcagagggtttgaggctctaagccatggtgtagacaggatgcaggaaatgacagggrggctgcttctgggctgtggaagatgggtggaggggacaaaatgagaagtgtcctatattcctccccaaaacctcctggtttctggatgcttcctcaaactttaatctcccagctgcctttgttctctaagtcactggttctcaaaccttgtgggaccaagggctgcatgagaatcacctaggacccttgttaaaaatacataatttcagccacctcaagatctatatagtcagaatttctaagggtaactgagaattcgcatgtcacgagttccctggaaagattctgctgagagccagcgtggaaagccccggcacagtgagtgttcctgttggtccyctctctgaccacctcagacygactacatctccaggctcgaaggacctggcccctgaacccccaccctccactgctttatttttctctgtggaactatcaccagctaacattccattttgtttacctgtttattgtatgtccccttctgctagatggatgcttcaggaggacaaagtctttttgcttttttcttattttctttattgttaactgcacacactaggtacataatagacattcaggaacaattaatgaatggatgtatgaagaatcaaagaaccgagaagctttctacctattctgcctaaggatacatgatgaaactaagctaaaaaaatgaaagggaaataattctatcaagaaaaaattaaataagaggatacagcaaactggcttttcctttagagagtcaccaatatatacacatatacgtatacacatacaaaaagtcacagacacaaagagggaaatgagccacagtgttaggagatagctcagagactctgagccacagatactcggctgtgggtayctgagtcagttttcctggaaatagctttgaaataccagcatctctagtcctttctgaatttgtaagtagtctttggacttttgttatcaaacatcagagtttattcttgaaataaaagtttgtttccccttggaattctgaggctttctcctttagaaccttggcagcctaagtccctctctacctgtgtctttaagtatggtcaatattcaaaagctttggatggcgttgtcttcgtttatgcggatattaggttgcctcagtcaacaatgcttgaaaatggctttaaaatgagcatcatatcatgaagccatatttgtatttaaattaaaattgtttttttttttggyctatgtcataccagggataatatagagcaacagagaaccagggaaaatgtgattcatgcatctccaagtcaggaaaaagagactattggaatcatagccagcgacaaacaagttattgggatttatagaaaaggatggctgagcattcctggaaaaacaactgactttttgttgttgttgctgttgttagggaagattttgtctgcttaactggccagagttttcactccatcccccgaagaattgacgttttaaaaagcacaactgtagatttagattttcacagtcttttgctagattctttaccaaagactattagtgagtagtaaccctgggattgtytaaaactttattaaggatgagggaataaataggtttaatttcaggaaataaaactggggctaaattagtacttctctgacggaaaatgtataaataatgtgatcccctggggacccaggttagcaytagatttatttttaaattttataactcatctgaaagagagagaacayagtggaatctatatatttgtatattcctctaagctgttctgatttgaaagatattaaatcaataggaataactttctgagactcttgtaagattgcataagtcagcacaaaagtggcaggtaaccttcagtgtaagcaagaataaaagaatacatttaggagaaaggcatctaaactgtacttatatgatgatgaatttcaagctatgaattactaccagggaaaaggatttgaaatatggaggaccgaaaaggccccatagtcaaataatttggtgaaatattacaaactatattcttcaagattcaccatgtacctgagcatatgaarggcttgagaaaggcctgcagtaaagaaacctgcttaactttgtttattctgggctcaaataggttttcaaaaggagagaacgtgggttgttaacttcctggttggctactgagagaaatgagtctcttgagcaattatcctttgcaggtagcttccatgaagaacccagtttttgagtgcctctagcagagamtaagcttcaaacctcattaaccatggatccaatccaatatggcagcttgtatgttctccattctcaaagcccaatataaatgatgggctttcttcattcacccagataactaagagctgatggtaccccattgagcagatatgggagacaatgaatcttcatagatgagtgcctaaggatatatgtgtcactcaagagtaaatgaaccaatcatgttgctatgcatagggactcagttaaagaaaagtcagataaaatgggaggctggtatctcgcacagcactgatccggctctctgcctaatttttcacttttcatccagatgttccccgtcaagaaggcacagtcaataatgtatgaatcttaaaggcagaggcagatgtggttattactccctgtaggcatttcctgacttggagacgacatgttactcgagaatgactacaatttttaaaaatttaagttgatatagcccgcttatgagtaaatgcatttcagtgcaaaagtcttttcagaattacagtcatcatcacagtttagtttggcctttaaattttcactgtaaactctccagatggtcacatatgggggcttctaaggcagaacacgcttcccaataacattagagcaagcagccttctctaggaggcatccatttccagcagtctatttttaatatttgcttttatttcttaatcctcctgaacaataaaaatgaacgtcattataaccaagtgtggctgtagtcatcaatacttcagagtccaaaaatacattggccttgcctgaccagttgcccattttctggaatagctgggtatttatctagcagygagagaccattatcctgagacacagtcgtgttccaccgacacctgatctactaattaaaatcactatcatgatggactgtttaaattctggtttaaatgttccttttgcatttgcatttaaaagaaaacacactcctcatcatgggcaccccagcctgggttataatttggctttcctttgccagaattataatgtcactctgacttgccgctggttaaatctaaaagagcatctaaatgtgcctcacagcttggctgttgcttggcaacgccagcagccacctcctcattggggtgacttctaattggtcacaagtcttgacaggagccactgacttattagaaatgacacttgattattcacctagatggctagagctgatacttagcagcaggaaattttgcataaaaaggagtcgtggatgtttttaatatctgggtggcttttagcgatggtgtagtggaagaaggaagtgataagtttcattagtggaaattaatttttcatttgttggtcaccagtttagagcactttaaggcattaattttttcattttwaaaaaaaacccagaaatacgtttaaataccttcccccacccccagcagctgacccttacttattcagaaaaccctcctctgacatcagccccaaaatattgcccccaggtccaccaagggccaaatcagatgaaatgttcaatttataaaggtcaacaaatatttattaattagttcctgttgttaaggagtttataatgtagaagagaaacamggtacataaatcactgcattattaccaatcgtggaaggtggtgacagagctggggtcctgctttgagcatcagaagccactttggcagggaggaagcagtgagtagcaccggaattgagctctgaagattttgctgttttgacagagggagaaggtgcattgcaggtggaatgagctgcaggaatcaaggcatctggacagaaaagtacagggtatgttcagggaataggggagtacaaattggctggaacacagagtacatgtaagggattagtgagaaagaaagctgaaaaagtaggttgaggcacgtacagttcactgttctgtgccgagagagtgtttggtgcacacttcactagagctcgaggagctattaaatacttgaaagtgagggagtgacctgctcagaactctgtgttaggaaaaagggtttcatttcagctgtttagcccccaagccagccatttcccagacccatggggcaaatctttctggtgcagatgaggggaactgtgaattgtctggaggagtctcctctttgtagtagccccaagtatgggcaggctcccaggggccatgttatgacatcaaggcagcggtgtccactgtggctcttttgagtccctcttcgtgtgtggatcaacaagtcacccaagctacacaccatcaacgtttggggcttatctctgtttagatggatagggttatgyaaaaaagaccctctccttccctctctctgtgtargaaatatgttttccctagcactcagcattgtccaaactttcargaactccaaaggcttaaagatggtgggttttttctttctcaagtttatgacataagatctgcacagaatgacctagaagtgaataaactaaggagcaaaggaaatgtggaggctgagttttgtgggaaagcaacaagccaggagtcaggatatctggggttccaattctcatttgaacacaaaaataaccagattctgccctttaggtccctatgtattctgaagttgatgtgtcaaagaaatgacaaaaggctttcttgggaatgggatgtgttgctgaaagcacatggaccaatgatctgacacttccctgcactgagctaagaatttggctgctctctccatggcttcaagcaactgtctcaacctgatgctttgtgacctccttggaatcttcaaatgtcagtggaaagggacattatagctcattgcgatcagcccttcatttagggatgaggacccacgttcagagagattcaaatgccaggtccaaagtaacacataggaccagcatgagtctcagctttcttcttcagagccagttttcagcaaaccacactgtattcatgctaagagacagtgcctcaatctgttcatgtttcttgggtaccttctatgtcaaggctctcaaggaacatttgatcaatcagtcatcacacaggtatttctagaaaatcaacagaatggggtgtgctatgctcattcttgatataacaaataccaaaaacttcattaatccatgacaacatgcaatagttaccacaraagagcaatattgagagtgtattagttatctattgctgtgtaacaaaattaccccaaaacttagtggcttaaaacaaacttttgttagctcattgtttctgtgggtcaggaatcctggcatggcttagctgagtgcaaaggctgagtccagagggactgagggctgaggccagagggatcarggtgtcttggagtagtagtcaaatggctggcctgatctgtggtctcatctgaaggcttgactgggggaagatctgcttctaagcctcatcacacggttattagcaggattcaattcgtaatggactttggaagataagaatcttgtactgtgtccttcagtcagtggggatctacaaatgtttcagcaaagcattactgaaataacaagtatttttggaagatctggccaggcatggtggctcatgcctgtaatccmagaacttcaagaggccaaggtgggaggatcgtttgaacccaggagttcaagaycaacttgggcaacatagggagaccccgtttctacaaaacattaaaaaaattagccagctgtggttgtgtgtgtctgtagtcccagatattaatacttgaggggctgaaatgggaggatggtttgagcccaggagggcaaggatgcagtgagctgtaatcatgccactgcactccagcctgggtgacagaatgagatcctgtctcaaaagaaaagaaaagaggccaggaagctctttcaaagaactttctttagtacacctgggtgtcaggcactrtcaaagtcctaagactacaaagatgcttaggctatagtcttttttctcaagaaggaagatgacaaccatattccaggtgacaagtagcaacacctgaactaggaggtgactgaggagataaatatgaaagaacagatgaaagaaaggaagcaatgttaacatgatgaggcaagaacagatggctccaatggggagttgtccctgaggaacaagaaaagagaagagaatgattccagtagtccaaaccagcctgggaggayggatccctccagaggacaactaccatgtttacaccactccctgcyttctgtgccaagtgttttgcatattttgtttctaatctttgtcacgactcttcaagggaggtattattttcatttttgcagatgaggaactagactcagtgaggttaggcaatgtacccaagatcacacagctataaagtgccaggggaaggaaacctactaatttgcagtgcctttgagtatttgctatgcttggggcaagtattctccaacaaggtcggaatcttacactcaaggaaggaaactcagtgatgagattctgtgagtcacccaaaaggagaggagaagaagacctttgagcagaagctctcagcccttcttggtcgttactctctttgcccactcatcaggccctccctccttttagaattcactctgttgccctctgtctgcaccttgactcaaaatttcacagacacagttggtagaaaatccattaaaaaaaaaactggtgcccatcaatgacagactggataaagaaaatgtggtacatatatggcatggaatactatgcagccataaaaagggactagattatgtcctttgcagggacatggatggagctggaggccattatcctcagctaactaacacaggaacagaaaaccgaacaccacatgttctcacttacaagtgggagctgaacaatgagaacacatgcgcataaggaggagaacaacacacactgaggcctgttgggggaggggggaggaagagcatcaggataaatagctaatgcytaatacctaggtgatgggttgataggtgcggcaaaccaccatggcatatatttacctatgtaacaaacctgcatgtcctgcacatgtatcccaaaacttaaaataaaataaaattttaaaaaactgggtactttaattacataagaatctccaggttatgcagaaccttccttccttggggaatttgcttcccagggtggggatggtgatttcccctgaatggttaccactggttgccagacagctgctcagcctcacactcggcatcacctgtgtagggacaaccaatgtgagaggcgagaggaacaaaatgggaaactttctcccctagcttggctactgcactgcaaccccggtcttagcttgggctgtcataaccaaacaccattgagtgtgtggcttaaacaacagactttttttttttttgagatggagtcttgctctgtcacccaggctggagtgcagtggcgtgatcttggctcactgcaacctccacctcccaagttcaagtgattctctggcctcagcctcccgagtagctgggattgctggcacgggccaccacacctggctaatttttgtatttttagtagagagggggtttcaccatgttgaccaggctagtcttraactcctgacatcaagtgatccacctgccttggcctcccaaagtgctgagattacaggagtgagccactgtgccaggcccagacatgtattttctcacagttttggaggctgggtgccagcgttgttggtttccagggaggcctctctttctggtttgtgggtagccgccatcttgctctgtgcccacaagacctgttctttgtgcatgagagagagagagagggagagagaataagcatgagtgctctggtgtctcttcttataaggacaccaatcctattggatcagggccccatccttgtgactttaaccttaattacttccttagaagccctatctccaaatacagctacactgggagttggggcttcaatgtatgaattttgaggcaacccaaacattcagtctataagaactcccaataaatcactttttttaaacctaataacattaatattttatctgattataagtgtaatacatgtgcattgtgaaaaatttggaataaaacaaaaaataaaaattactcattatcccatgaagaagatgaaatgtaacaaccgaatgcatcttttagtaagatctgagtgagaatagcattgtgtattcatctgtgcatgtgtgtgtgtgtgcacatgccacgtttgcctgcttgttcaaaaatctaggagaagaactgcggggtttgtggattgtataaagattatgcaagcccatcaaagacagcttttgtttgtatgcaactcatgtaaaagtaaatattccgtaactgctgtgtaaaatgcaaggaagaaaacctgaaatgatggctattggccaacatacagattatgctcggctgtcttataatattttctctgcattgctttttaaaacatttttcatattacatgccccatctcatatcacattaacccaaataaaaatgtcattatccattcagttcgacagacagcaagcagagtatcgcagaaaattacaatcacgtcaggcagcaacaaaggattctagtcaaargcacgtagaagacccgatggtgggcagctggcctgggctytctttcacactgtccaggaatatgtttggattcagaatgggtggccccctctttatacacagggcatgcctctgaagagttgtgtgtaaatcacattttatgttccatctcttttgttatgttaagaaagcttcaagctagatatctaaaaagacttcctttcaaacagtacatatatatatgtagatagatagacagattttcttttaccatgttactattcctctgaagtaaatttaaaaggtatttaggtttatgggattttatkaaactaggattcagttgtaccactaaacttattaagataatcgaaggaagatagccagtaaagctagttataaaaatgtggcttagactgtactgacttttccaatgttaagggtagactgagacttcttggaagttggggcctagagaccattttaagtgacccattggcacacccttttgtactgatggattattaaatcgatggtttgtgagaatttagaaaagcatacagtagtcatgaagcatcaacacagagatactaagaataaatcaggatagtcatacttatttttcttttttgagtggacttccagataggtagatgaggtaaatcacatttctgtttctrcaaatcatttgacaaagtcttccccagctgactcatcagtaaagcggtgcctggctgagtatttacttaggttcatgcacagatagcccaagatccaaaaacagtgatgatgaatgattctgcggctacctaaacyagctgtccagtggaggggcacaaggctctgcaccagggcctgcctacagaccaatgaactgaagggaggcttagaaggcacacttactacattgcagatagaacgaagaaagaatagcccagtgttgcaggtgatgggatttttttttttttttttttttgagacggagtctctctctgtcattccagcgatgcattcttggctcactgcaacctccacctcccaggttcaagcgattctcctgcctcagcctccgagtagctgggattacaggtgcctgccaccacgcccagctaatttttatatttttagtagagagggggttcactctgctggcccgccaggctggttttgaactcctgacttcaagtgatccgcctgccttggcctccgaaagtgctgggattatagacctgagccaccacgcctggccaggtaatgggattttaatgagtgagtacatcttttgctcccccacagtgttcaaacaccccagtgctctaagccctgtggctttatgaacagcaaatctattttcccaagatggctctccctccatgagccttggcaacagggcactcatgagtctcagatgctctgctatctctccacttgggtgtgttatgctgtgaacattctgctccttgagctgttgttcagccgtccatagcgctgtccaggccattgtccctgccttggttaccacctccacgtggcagccttcatggagccattgcagctttgatctacaggactccctcgccctccatctacgggaccccctcgccctccatctacgggaccccctcgccctccatctacgggacccactccttcagcagaggagttgggcccctggtaacacaattctttccttacacccagagcacgtgggactgactcggaggaaactgcagaggagaggggtcctataaaatttcatgtcctcccaacatcctgtcaatagccggccagctgtcccactctaccaggtgtctccaaccaactgaatattccagagaagataagagatcgttctgctcagaacacacggcaggacaactagtgcctttctaatgaatggtccctaaaaaaatcgaaatagcaattgtacctggttatcatccatggaaaaagacctcgtggttttcattaacctgaacctcaatatttgcctgcactgtttgtcttctagaaaagtcaacataaaactggctttgcgattgacgtgtagggtacagatctcaggaagtgattcatttaccatacaccaatccacacctgaaatactgtattccacttatgaggccacctttaggagtgaccctgataaagatgagagcaataaggcaggaggggtgtatgcaagccatatggttcagtcccccattgaaaggatgggggcagccaggcacagtagttcacgcctgtaatcccagcactttgggaggccaaagtgggtggatcacgaggtcaggagttctagatcagcctgatcaacatggtggaatcccgcctctactaaaaaaaaaaaaaaaaaaaaaaaaaaattagccaggcatggtggcacacacctgtaatcccagctacttgggaggctgaagcaggagaatcacttgaacctgggaggcagaggttgcagtgagccgagatcacaccactgcactccagcctgggcaacaaagcaagactctgtctaaaaacaaaaaaaaagaaagaaagaaagaagaaggaaagaaagaggaaagaaagaaggaaggaaggaaggaargaaggaaggaaggaaggaaagaaagagaaggaaggaaagaaggaaggaaggaaggaaagaaagagaaagaaagagagaaagaaagagagaaagaaggaaagaaagaaaagaaagaaagaaagaaagaaagaaagaaagaaagaaagaaagaaagaaagaaagaaagaaaaagaaaggaaggaaggagggaaggaaggaaggatgggaacagttgtctaggagaagatggggagcagataggtacttgctgtctgagtgtcgggtgcactgtcatgaagaagagaacagaaatgaaaccagcaaaagattgttagacgaagtcagattttgcctcagtacaacaacataccttctgagaagcagattaactttataacttttcccagtgcctcaagactttaagaggaaagagtgggtattacataatcagtacgatgccatgattcgttcattcacttaacaaataattactatgagccaggcgctgttctaggtgctgggtttataaaaatgaagaaacagactaagatctctctgacctcgagaactcaatattctagtgtgaaaatcatcaaatctaaacataggttacattttatgtctttcatgagaaatgctcagaatgatgtattagagcacgttgctttagctgtgatgctattctagaatgggcagcgaataaaatgattctgctcgatattttcagcttggccttttaatcatgcaagagagaataaaaggtcacatgggtggccagcaggctccacaaagaattccacccacccgtttgtcgaagycgagtggtatctatgtgaatctccattatgccactctacctttctgtgtaagttaggaattttctaacataaaagtattttcctattaaaaaaaagaaacccaacaattgccccatgtgggcataggaggcatcttgaagtcaaggttttcccagtattcgaaagcttagcggcttaagcacaaaagaataaccatccatcaggaatgctctataaataatttctgtgttaaataagaagttgaaatggatgaccttaggttcctttggatactaagattcaatattctagtgaaagatctaaaatacaatcggaatacacaagcatagacttgggttaattccagggattgtgcatatggattaggctttatttactygctaatgctaaccaaatgtcatgaaactgagtactgattctcagttttgtctaagcacttaatgatcattttcataattatttcaccgtattcactgtaaatctgttcttcttttttgcttccaaagataaaaaatgcttaagctaaaatagacgtttagagctattgtattttatgaatatttgtgaattttaggatcttcttcttgaatcttagctgtgtgaaaaatatcttccaaacagtgttcattttcccagamagcactacatataacctcttcatctgcagccaatttaggtgtactcccggcatggtgccctaattacacctttgttatccattatcagatggttcccctcatcagccaagcctgcgamcttmtcctggctcatttaaaacgctatgcggaatctggggacgcatttgacatccagaggtaaggctgctgcattacagatgagaaatcgagtttttgaatcactgcttcttgtaactgtccataattgctgacaattaccttgggactagcaaactgtggaaacgctagaagctcataaaagcatggatggactgattaataaaaagaaaagaaacccacttaacatgggaaagagatgtgagcagagccagggtacgtgcgtcctgtcgaacctgtggatggatccaccctctgacctccacagacccaggaatgggcaggacaggcctgcgcctaaggacagggatggggggaaagttcaagcattttcacttcaagaaaaattgtggtgcacctcagcccagaagctataayttagtggtggacaccaaatttaaataactgattatctggcttttcgtcattttgtaactaaaaggtttttgctttaaaaaaacatctttagtctaagtttgtccgacccacagcccgctggccacaagcagcccaggatggcattgaatgtggcccaacacaaatttataaactttcttaaaacattgtgagtttttttgcagtttttttttttctcatcagctatcgttagtgttactgtattttatgtgtggccaagacaattctcctgcttccaacgtggcccaggcaagccaaaagatttagccacctttgctttagtcattttatgccaaatcatggcttacagcagataaagaataaagtgggatggtgaatcatccagaaatttattcattattatcattgctaataaaataataacataatcatcaccaacactggtattgcaccagtttacacagtcttttcatccacattgtctctgattattataggatgcatgagttggctaaagataaggtggcctcatcagctataaaagcaaagtaaataaccctcaagacccttaaatcttcaaccttcaggatcagatgaaatcacattcagtagtctcattcttgttttcactctagcagggaaaygtgtaatcagttgtagaaacgttttcaataaaagcagtgtgaattttaaaagtcatctggaaacgtcatgtattccttaatgataagttagtggttatagaattcatgtacaaaaggagttaagtgtgtgcctacattgagaacaaaaattggccttttaattataaaaagatattaataacccagtttttagctttttggaaaagaacttaatctgactactcctataagataacaaaaagaatcatttgagtttaaaatggccttttgagggsgcagctttcctatagcctaagaggttaaattttctggagctcctgccagacacttttccttctgtttgtttctaaagcacaatgtatgttttctgtaataatatacagatgttcatgaagcctgccttaaagtttgtcttgtgtttatttgagtgctaagagcccttgctttttgttcrttgctattaagaaaactgtaaaatcattaagaggaagagggagacaaagttaataaaactagataattaggttgttaattcatcaaggacaatttgatgtctatcagtcaatcattagattctggcctgagctgggctgtgcagagctttgggtacagcatgtaggcgttgggtcacctgtgtgccctccttcccagggaggaaactataaagtgtccttcttagtacctggctgtgttctggttgaccacagctgcctgaggctcgaaggtggaagaggctgtgccctcctctcctcccaggtctttgtttagacgccaggtcttcgtgtctcctcccaccctctgccgtcactgctcagagtgccccatccaggagcccatctccctccacctccccccagatctgcagaagctcctcttccagacacatctgcagggctgggcaagccagtgtaagcaattcaggccctcctcctctggagggggccattgtgggtagcccctgccagagtcctttcagatctctgtgctcccatctcccgtaggtgctactgcaattacaccacagatgtggttgccagcgtcgcstttggcaccccggtggactcctggcaggcccctgaggatccctttgtgaaacactgcaagcgtttcttcgaattctgcatccccagacctatcctggttttactctgtaagtgcggctgcagcccggggcgctgcgatgactccagcaagttgggcagaccccatgacacctggggtggcttctggggctctgtccctgccactgggaaagggcactcgggttgttcccctgcagaggctttgtcttatggagccaccgggttcctcttgtcacccgcctagggccacttattagcaatgctgtagccctggcattggtaataagtggccccaccgccatggtgagaacggttgggacgcaccgtgttaggcacggggtgtgcgttgcctcacttagtcctagtactcaccctatgagaaaaatattcttgtccctatttctcaggtgtgaaacaggcctagaaaggccgagctgagactggaacccaaagcctttcatttcctagggcatatttctttccttcagcaaaatcctcttcacaagacttctccacttgaagcccaacacacagaaatcctgtgtggtggatgaggattaggtcacccaatgcacgaggaccagtctatttattttattttatttattattattattatttttttagatggagtttcgctgttgttgtccaggctggagtgcaatggcacgatctcggctcaccgcaacctccgcctcctgggttcaagcgattctcctgcctcagcctcctgagtagctgggattacaggcatgcaccatcacgaccagctaattttgtatttttagtagagaaggggtttctccatgtcggtcaggctggtctcaaactcccgacctcaggtgatccacccaccttggcctcccaaagtgctgggattacaagcgtgagccaccacaccaggacttattttatttttattgtagaagtgagattttgccctctggccaattctagtatcttcttgcttttataggagcattgacgtgttgttatgcttggtattgattattgccatgatttctaaccattctgctgggctggtaaattccattcattccttgaccagtttcattcccgtttctgagccgatgtccatgggagcccgtcacctcactggctccgccctgaaatcgtaggcagagtcactctgagtgtccagcagtctcttcctgcaccctttccaccgatcttggaggcagcgcaggctgtgtctgccccttgtgcctcaaccacggcccaggcctgtggggcaggtggctcagttgtgtcatcccttctatttctcctctctgcctctgcagggccctcctgctgctgtgtcacattggttcggactctggctcttgaaaatgggcctgcgcattctgagagcatgtgtgtctggagatgttctccccagcccagctcccatagagcccggtrcagggtgaacccacaatggaagctgagaagctgaacccagccagtgcccctctccaggggagatgaggggttcctgactctggcagcccgatccccagcacatggcagcaagggcccatgctgcacccaggggccggcaagggaggcacccacagcagcaacagccagtacccttgtcagcagctgcagtggcagctcttgggagcaattcaggaggtcatgctgggaacaattatccactggaaagaaaattcaaatgaccagaaagtttgtaaaaagtaaatcagcttctaccacttgctaaggcttgaaacagcctgtaatcctttctctcttaatgaagtacaaagaccttcaggtctcatccccaggacctgaaacattaatttatgagggtgaccttgacctcttgagggccagatggaagtgcagactcgattaattgcacagatgtttaytgagtgcttactatgtgccaggaatggtgaggagtaccgagagggagtgagacatcacccctgctctcagaagcagcagtgcggcggggagggcaggactccaaaamggctccgattccaggcccgcgtttgcttcccgggaacaggcgtctaatggccctggtttattatcacccccttttcaatgccacttttgtttttctctttcaagtatcatttccatccataatggtcccactggcccggattttgcccaataagaaccgagacgaactgaatggcttttttaacraactcattrggaatgtgattgccttgcgggaccagcaagctgccgaagaggtaacgtattttaataggacacagccttgaaatggaatggagccgactttggcatcactgtctctgctctttctcttccctctcagccccgcacatcacaccgtgccgtccttcagcaacccaccacttacagcttccagggacagtggagagaacagaggaaggttgaggaaggtcagacaagaaagggagggtgggacggcagagagaagcctacagcaatgtgtacatcctcggacacggacgggtagaattaaagccgcccccaaaactgtctccctagtgcaagcatcaacccaagcacaggttagaatagcccagaagaattttctgggtaagtgtgcccacatgcaattttcatgagcatattctttatattgaaaacccagcaagatggagttctccagcatgaacagcatgcttattagagagttcggcaactgtcagtcactaaccccacactcccactcagcatggaggatgtcgctacagaactcgtggttgagggccccctggactccttggcacgattcatatgagacgtagcattttctttcctccttgcagatttgcactatgcttggcacatagtaggaatcaagtaaatatttgttgattgaacttggctaaaatagaaagaggagttttcagtgggaagaaaggtcatttcaatactggatatgcatatgcatatgtaaatctgggctttaaagcccttgtcacattaaagaaagttactaaaaaggaaaacagggctgaaatggcctttccttagctggctcgtgcaagatgcaactttaaaagggttgtctcaaagactggatggctcagaggaattggtgagggccaattgttaaggcactggcctgaaatgaaatcaggggtcaattagtggcttgatacaccgagcggccttgggcagcagccgcgtcctgtgcagcttcacgcccggagaactgtgcagcaaacgtgtctagatccagaaggcatgggaaggtgtaggcaagcttgcagccccytcggcccacaccactgtgaactcaactcgcatgtccttggaggtgcgggaagaagcagctaactggcatccctgccccagctctgaagcctaaaaggacagaacattctgatccaggttcatgtttctccgcagagtgaggctggagccagggggagaagggataaagaaagaaccattttcaaccctcaacattgctactaagggccaccttttgagagtgttcacacacacacacacacacacacacacgcatccctagcctggctgtggaatcaggctaaaaattttaaaactgttgcatcgaatgacttactaagaggtgagaggttattaaagatccaattactgggattgcctagagcttttccttttataaactctagtgctatttgtttcaaacaatgagttgatctgagaaaaatctcccaaccacaaatccaggacagccatgtcaagacagagctatacggttactaagaaaacttgctttaaaaccatctaaagtctgtatacattccatcaagcagatgtgtgtttgcgcagtgaaaatgcrgcacagatgttaaaaggtaaatatttttctaagctctagccgatgggtggattagacacctacatctatcagggtgcgtattttccttggataggaccataaaccagcaccgtttcagtcctcaatgggcagtgttcagatagcctccctgatgccatgtgaataaaagaaacccatctatactaatgttcttctccagtgcacgggccctggagagtggcctttcctctggcctctgtagctggaggttaagacagatttctgcaagattctgacagccctttagcagtctgtctgggctgggataagaggaaaggatgctggctgcagttttgcccatggaaaaatacccggtgtagaggtggctgtgccctccctcccatcattactcctacactacctcagcaaagccatagccaagcctcagggaccacaatgatatcacacccygaggaccttcagagggactgactgagaggtctgggggtgctctggggtcctgtgctggtgtcccagagctgagggagcaagggatgctcacttcccctgcgtgccatcttgcctgaccctgccccagctctgctccatgggagcagggccagcagtgggaccacaccagcgcccattgaccgagcagcaggaaggaagctggggaaagccagcccttgaggatgctgtttgaaaatcagaacgagcagggccagggtggaatgaagccaccaactacccccgaccctcaccattttctcagctattacaacccagcaggctgttgggaagctgaggccttgcttccttagactcaaggtctgtggcacccatagtcttaaccttgagcactgctaggatcccagtaggcaccttccaaagtcacaaggctggggtgcagtagagctgcaaaggtgtcagcagccaagactcccgctctaaagagcattcacttgtcatcaaactcagcatacccatcctccaaatgcacgcactgcattacatttttatctgttgagtcatggactgcagatttaacatgtgctcagcataaaactaggcacggtgtcaggggttgagggtggggtcctgccctggagttgcttataatcttatggaggaggaaaagcaaccacacatgaaatgacaacaatcttaaaagatggaatcatcaggaggctgaggcgggcggatcacctgaagtcaggagttcgagaccagcctgaccaacatggtgaaaccccgcctctactaaagatacaaaaattagccgggtgtggtggcacaygcctatagtcccagctactcaggaggctgaggcaggaagatcacttgaacctgggaggtggaggttgcagtgagccaagatcacaccattgtactccagcctgggtgacagagcaaaaaaaaaaaaaaaagatgaaatcagacgctcatgtgtgtggcatagattattaatgcaatcgaaattcagaagccagtgaactgagaaaatgctgcagctagcagagtactttgcatgaaattctaatatttttctgttggtgattctgatactctccttttgccattttagtcccataaacttcagaaaatggaaatgtcttggttgtccttcatgacattaaagagcatttcaaagaagggatgttctaggaataagctttgttaacacagaggcgatatagaaacactcctattgttacaattagtaatagtgaaaatataaagaatatgcaaatgactgataaagaaggtagggggaaatggaaaaaaagctctgactacttaaacgggggcaggggattactgagaaatagagggaaccgatgtgaagatctgatatgaaggctaggggatgaagaaggcaaagcctggagactttgaagacaggcgccgccaaactagtcccctcgccttgccctcacttctgttaacttcctactgtgtgagaaaaactggtggctgcccatctaagccctaagctgcacagaagtgagcagtacagcacatgcttggttttaaatctatctatgtgatgttgccattgttttattgttggaaaaccaaccaccaaccaacagtacaaaaatgtataaagtaaaaaataaaagcccccctcctggttttcccacctcctccagctcattatgaactgttgggtggggacattgctaaaatcgtctatgtgtagacagatataggtgatgatatatttagtacatttgctgtttttgcagaaacgagagccacagtgcatactgttccatgaccggctttgtttttacttaacaaagtggctcaatgactttcacatcagcccagatagaatggcctctgccttgctcagggcagcagcccaggctgctcttcactgccccagaacctgcctgaccagtgctatactaagggacattcaggtggcttccaggttctcaccgtcccagataacccagcaatgaggaagcttgttgctactgagctcttcaaaagctatgcccatgtatcttcctcctttgttctccaggaagcctcactcttcatgactgtaaggtcaaaatgtgcatttttctccttttgttccttagaggcggagagacttcctccaaatggtcctggatgcccgacattctgcaagtcccatgggcgtgcaagactttgacatcgtcagagacgttttctcctctactgggtgcaagccgaacccttcccggmaacaccagcccagccctatggccaggcctttgactgtggatgagaytgtgggccaggccttcatcttcctcatcgctggctatgaaatcatcaccaacacactttcttttgccacctacstactggccaccaaccctgactgccaagagaagcttctgagagaggtagacgtttttaaggagaaacacgtgagtacaagttggatccagttacccatgggatatccayaggacaattgattttgtgtttgtgggagtgaaacttatttttaatgacttgctaatatcacattctaagcttataagatgaaatagggtcattgcttggcttctcctgctctccgggttagcaagcgaaatgaaatgttgagaacaataaccacaacaaaaagacaaattgtgtgtgcaccttcactgtctggggtagtccatgaagccaggcctggctcgaggaagctgtggaagcccaggaaggtgtcaggcccaaagggcagggatggggaaggagtcatggcttcccaatatctgacttggagctgccacacggagggaggcaggtgtgagccagaaaggagagccaagatagaaggcaggagtggacaaaaggacaggccaagctgaagctggactgaagactggaagctgaggaggaggctcacaaatggaataagggaagatggggcccgtcagcgcccaggccagcttcagggcattttcttctagatgaggcccctcttgatcgyttatagcagatataacgagggtgctgagcaaggctactttatcacctcattttttcytctagatgcttgtgtgtgtataactttgactcatgagttgtcaaagagattcatttttaaaatctgtactttaaaaggaagaccaccacagtggaatcctttctgttacattctgatatgattgctattacattcaccattttgaaaggtggtctgttctgttactggaaccattaaaaaatgtttcatacaatgaactgaaaaccacttcccgggaaattctacttctttattctactggggaagtaaaggcaaagtcartgtctcttcttcacagcagtttttaaatatttgaaaactgcattcactgtgttactaattaattgtcttaactttaggctcaacatgagtttatggtcaacttcaagttctaagtagttatgacaactgccaagctgggcctttccaaaccctgcttacacaattgatttattgagcctagacggaagagtttatatttatccttattactgttcaagtcagtcaaaataattttgaatcttgattctgccatctgttatattagcaattcctccagcctcgtgtcatctgagacttattaagcatgtctcctatttcatccaagtcattgattaaaatgttgaacaggacaggacttccctccagattgacattgatccattaatcaatattctttgggcatggaatctcaacaagccatgaatccaaataaccctgccacccatcttattctgttttatatgtagtggtttgtgtatttgttcttaaattgaggaaagggtagagggagggaccaacggtgactggggtgcattagtgcaaaagaagtaaaaggagctggaagcgaggcaatctattaggatacatttagttgcagataacagaaccccaacccaactgatttaagcaaaacaaaaacaaaaagtaaaaacaaacaaaaagactcataaatgtgtatttctgagtacatttaattgagcagctcaggaatagatgtggctccaggcaaatctttgtctaggtctcaaactggtgcacaggtccgtttctctctcgccagttcttggctgtgctctcttatattggccccatcctccatcatgctctcctctcaaagccccaagaagcctgtcaagagtgtctgggactccatacttccttgcttgtaaccaatggagaagagagggtctgtggcctaaaattcccagaaagagtcatgagggtcactctgacgggaatgcttaggtcgctgcccattcttttttattttttttttgagatgaagtttcactcttgttgccgaggctggagtgcaatggcacaatcctggctcactgcaacccacacctcccaggttcaagcaattctcctgcctcagcctcccgagttgctggcattacagacattcaccaccacaactggctaattttgtatttttagtagatacggggtttcaccacgttggtcaggctggtctcgaactcccaacctcaggtgatccgcctgcctcggcctcccaaagtgctgggattacaggcgtaagccaccacgattggcctgctgcccattcttgaaccaactcttgaagcaaggggaatggggtccctgataggcttacaccaatcagactctagccctcagtcaatcatgctcaagtcacatgactgagaacttgggaaggtgacttctcaagggaagcttagcatgctgtcccaggaaggcattagagggaagcccagcgctctggtctcagtaaaccagaaatcacaccaaattaagggctttgaagcatctaatgagtgtccagcagtttagtagacacagcagaggctaggagagggggcagaagctctaagagatagaagtcaggtcctcatcttgcgggaattccatcgccaattgagaagcaatgttatgtctatgaaacaatattttccttccaaacacaggcctgcagggcagtagaaggcagaagataatcaggtctagaatgtgtgatgtcatttagagagccatggggcgataggagtctgtcccaccagctataacmatagtcacatccagttatgtcagtctgccaggaggacacagcaagtgctcatgttaggccaggcacagtggctcatgccagtggctcatcccagcactttgggaggccgaggtgggtggatcacctgaggtcaggagttcaagaccagcctgaccaacacagtaaaactccatctctactaaaactacaaaattagctgggtgtggtggcacatgcctgtaatcccagctactcgggaggctgaggcaggagaatcacttgaagcagggaggcggaggttgcagtgagcaaagattgtgccattgccctccagcctgggcaataagaaagaaactccgtctcaaaaaaaaaaaggaccacatgttattatggggctgtacagactgttgcaaagcactgagaccccttggtcaaataaacacattacagcaggtcaaatttttgagtttagtgtgcataaaagtatataggaagactgcttagaatgcactttccagggtcctgacctcaggggttccgattccataagtctgggctgggacccaggaacccgcattttattttattttattttttgagatggagtctcgctctrtcatccaggctggagtgcagtggcacaatcttggctcacagcaaactccgccgcctaaggaacccacgttttaaataaatgtttccagtgattctgatgcaggtggtccctggttccactttgagaagacagccttagactctcaagggctcggatccctcttccaagaaaaaaaatcagggtccaaagccctcctaagccatgcaagccacaaggtgattttcttcccctatgtgatagctggttgtgggggggagtctctgaaaaatgggaatatctacagctgtctttttaaaaacatacatttggtagtcacaataatgttgctttgcatagccttgcacatggcacccactcaatgaatattggtaggttttctttttttcttttctttctttccttcttttatttttttaattttttttttttttactataatcagagctctgttaatatgggccatctgtcaggacatggaaatgcagattagatgttcacacattagatattttcctgaaaatattcctgaaaatttgcatgtaaagtatgacttgttataattttcctgctggtttccattcaacaaatatttcttgagtgccagttaatgccagactccggggctccagccctacgcacgagggtgttctggtctagctcttctgtgacatccctgtagagcatccccatgcctcattagatggccttcccttgtatttgtcaatgagattgcttaatttgagctctagagtttcttttccctgagcaatttctttcatagcaatgcaccatgggaatctgatgagagctacatctcttcctccaagaaagagcagatatgtgcatggcatcagttcagactcttctgtggacagtgataaaaaaaactcagcccagattgtctcagggagtttactgacccctayaactgaaaactccagagggcagagctgccttcaggtatggcttgattcaggggctcaagccctgtccaagttgttctctctccccatttctcagctccggtttctctgggcacactcccttctcaggcacatctyccctaggggtctcaagccagctgtgtaaccagtgttttgaacagtctcaactcagtgaggtaccaacttgaaaccatttggtgttttttgtttcatttttttcccttaaatgtgctctgatgaatctcctttccctgtccgtgatgatactttggacagatctcaatgatttctggtcattttggggggcattaaaaagtccaggccagtctggcccagatgaaaacttcaggctcaaatccaatcagtgcccttctgttctcttagctcargctgacctgtggcctgaggatgccgccctgcgggaggagaggtctgttttttcccctccttctacccctcccccamccctgctgggcccctttctcctccaggagtggggcctgtgaacggatccccaaatcctgcctacctggagctgccctcagtgccttccctgcggggcttctgacgtggggtagatgcaagacgtattcggagggctcccaggtctgaagtcctcactgcataattccctgccagggagacaggctccagctcctgccaccagctcctgccccaaggctgcttgatggggaatcttgagcaggataccagctagatggctccagcttccatgccttccccagtgtccgcccagcctatgggaaacacacaactgggccacacccacagtggccaccttctgccctctccttcctccctccaccctgtcatgtctctccaagtacttttcctttgctcaaataggcagagagggcacatcagcaattctgctgcatgagcagatggccaaggagaatggcccacctctatgagtggctctgctgaagaccctcttccttggcttgggagtagggaggaccctcttccctaggccaatgactccttgctctaagttttctttaaatccctctaatgtctttataggctgaggatgggggtaggagagagtaggttcaagttcaacgggaagaagcaagagtctctttcctgcaagtctcagcaaaagcctcctggcatcccagtgacttcgagagggtcatgcacctgccccctcaaccaatctttggaccccagaggaatatgatcccctgattggcttagacttgggtcatgtgccccatccttggagttggtgtctaggtgaggccttacccaaaccactgagctctcgagcggaggagaggttgatccccaaatcactcttattaaaagtggggtaaatggcttctgggtagccaggaaacagtgtgtttgcccacccctgtacatagaatctgtggcccccagattagaagttcccacctctcaatttcctgttatgtgatcatgttcaccttccctctgaacttttaaaatccagcttgccaaattagaaggtataagtccggcagtgcctggaacagcctgctcttgcctgtttcttgcaaatcatcccaagttccctgtgatttctgcaggaccagtcggtccagctcagcagttttgccttattgcatccttcaccatttgagaagtgaaaatgtcaggcatgaaagtcaataattcagattctctactgttagcagttctaaacccctggcgcatataaagatactcaaaggtctccctcactatcggggatctgcctccgcacatcctgtctggcaacatcccatctctcatcccatacagccttgactgcattctcctttcagggtatagattttggttccagcttctaaaacagttacaatccacttttttgtttgtttttgttttgttttgttttgtttttgagacagagtcttgctctgtcgcccaggctggtgtgcagtggtgcaatcttggctcattgcaacctccacttcccaggttcaagtgattctcctgcctcagcctcccaagtagctggaattacaggtgtgtgccaccatgcctggctaatttttgtatttttagtagacatgggatttttccatgttggtcagtctggtcttgaactcctggcctcaagtgatccgcctgcctcagcctcccaaagtgctggaattacaggcgtgagccaccgcgcccggcttcaatccactttttaattcatgcccccagactgattctttctggrccacatgtgttttcttccaaatcgtcttgtttgggaattttatctggcctctcctcctcttgtcccaccatcaaaattcagtgtaaaatcttctttctcaagtcccccaatctcttggagaagtctctcttttcccatgttgccttggtctatggaaaaggaggtagtacgttcagtaaattcaatagtggatgggtgggaaaaggtttgtaccatttgtaccactcgtaaagctgaaaaaaccacaccatctatttaatgagacctttgttatatggctgcttcattgtgttctcatgtaattttgaaaaggatgagaaaggaaaaaaaccaacttcttttcatataaattgtgtcttctatagctttagtgttctatgttgaaattattgacttttgatctggctaaaccattctcttttcttctctttggtgctggactctgccagccaaaatttatgacccattttccttctgcttaattgttgttataaatctgctgtgcagaacccagttgtaaatttatcacagactggattggattgatatacagcctctctttaggataatttgaacacagttatgccttagaaggaaggccaaattcttaaaacttctcttgaagagctgctttgtaaccattataaatatctaattaaaatacaacttactctttctttttctcttaaggataaaagaacattctgtgctggttatttcagcttattagctcatgctgctgtgtgagcaaggttgaggatttgttccttgaagcagtcagaggatctccaagaaaaaaaagcatattatgtgcttacaaaaaaaaaaaaaaaaaaagccgttttacccccaactagctttttcatgaatacacatcctttgtcacagggaaagggttgagcaggaaaaaaagtgaatagcttaacacaaatctatcctcactatggaaaaaaaaaatgtcttcccatgtggatctcacccagggaggagggcatggttggctttgagatcaagtagaaaactggaaatgggtttttccccatggggaaggtttcctcccctttgcccaggtctgctggggtcgggctacccacagttggtgaggagtaagttcaggagttccccatcaattcagtcccccagccacacaggggtcagaggtgctgctgagtctctgccttctgacagaccccacaacagcacaacaggacaacagagcacaaagccacagggacaagggaagaggcaaaacagagaaygccttacagccctaatgttgaatctaaaacaaagaacagcgtcactgcagcgtgagaaaagtggcaacgggctgtggcaccggcccttggttagggcatcacaaagtttaacgtgcacgggaatcacctgggagtcactaaatctgcagattttgattcagcaggtctgggacgagcctgagggtctgcatttcttttttgtgattattattttgtatttatgagacggagtctcactgtccccgaggctggagtgcagtggcacgatcttggctcactgcagcctccatctcccaggattaagtgattctcctgcctcagcctctcgagtagctgggattacaggctcacgccaccatgcccagctaatttttgtatttttagtagagacagggtttcaccatgttggacaggctagtctcgaactcctgacctcaggtgatctgcccgcctcggcctcccaaagtgctgggattacaggcgtgagccaccgtgcccggccaagggtctgcatttctaaccagctcccaggtgatgctgatacagccagtccatggcccacactatgtacaaggagccaggttctgaaccatacgtactgtgtctctctcacgtgtgctggacatggcaagtatgtattcctcatgacatttaatgtgctcatgttcttcagtggtttaccttttgctaataaatctcagtggtttcctgatyattccataatcatgatggcattcactttattgagtgggagatgaagtgatgcaggaatgagccaatcctaatacatkttagaagtgtattaatcctaaataaagcctaaaatcatctattttcttcagtaattgtttccatggtgggaggttagggggagcttttgaggtgatttaaagtcattttcaaagcagatgaagacggcaacctgagctttctgtcaggacatgtgtgtagactggagacctatcacatccaacgggaccctcaggccaatccttttaagcagggggctccacccagccccttagcttccctactcccctaagccccttggttgtagacagtagcttcgggtgccaggtgggaggccatgccaaacaactatagccaaagagcatgtctctgatgccatttctttggtggcctaggacagaatctgagctatttccactagaggaataggagcttcagcagggggccttggaaatgtatccaaggtacccacctcctgtccttctttctggaagcatctggccctgggaagtagcatcccgaccactaatatcagggcactaatatcaggcaaagggaggaaaagttgcatcctgaccactaatatcagaaaggcccctcctcccagcccgtgaagaggggcctctctgggtgtgtacctggaaccctatcttggaagttaagwtttgtggtcactgctaccaacacaccaactcccaggacacaggatactagggacttctgtgccccatcagtggacaagtcacaagttcccaaagcagggtgaccaatcgatctggatcaggtggcagggcctcggatcttaactgtccatttcattgttatgcacacaaacttatcttagagatccggccatctgcctgttcccgtcctggggatacctgcgggaaggcaggctgtgcctcccagaggtcatctgggctgcaaatgggtgccaagaccttcctctgcccctactcaggactccagactcctccacatcccctggagatactcaaagcccatgcccacagtaacccgtagggaaactgacccgctctgcctgggagctgctcccaggagcctcagcagtggcaaccaggagcttagagaccgctgtgcctctccctgcccaccctctccctctcatcctgccccatttctctgttgtctttcctctttcctctcttcattgttcacagcactatttaatctccttcccctctttcttcccttattcttgttctgactctattcccaggtccagagaggcccagaatcttctctgctcctgctccacctcctgacccactgccccctgggagcccctggtcatcccagaagcctgtaagtgcacacagcagccaagacccacatgcctgcaatgggggtggcacaggggaggcagggtgaagagcaggacagacttgcaggtgtttttttctgggctgcctggcttcatcaactgcaacactccagcactttgaatttttagcaattaatgccccaagtccccctccccctgagtccctgcagagcagagggaggggcacctgcaaagagaagtctctcccaggaatgggtcacaccaatcagcatgtatgtggtgtctttcatgtagcaaatcagagtctttcatattcaatagctgggcctctagagggaccaagctttgctaagcaaataagcttgtggggttggttcacatccatccagaaaagcaagaatgaaaaataaacttgggaaagtcagctccacaggtgaagctcaaccttctgtgcatctgcttggcatggagctacatttgcaactgaatggctcatttatttaactattgcacacattatgggctcttaaaacatcaaaagaatgggttttattcccaacaattagctcttgaaataaaagaataaacatactttttttttaacttccccagactctgttgaccaaagtcgctttcacaccagtggagtggaagctccaaaatggtatcatctggtgggaatttaaagacttcttgtccccaaaaaaccttttcgtcactaggcttaaaattttccattgggaggccctggctttgttttgacacatgatccgttattaacacaccactcattttgggaggggaatatcatcaagtcccagccaggatgtaaaccccacgactaggaagcctcgtccgctgggtaccttggtaggtcccagggccgagcacagtgcctggcacgtgagaaataggtgttgagaaaagttatttcactcttccttttctaactggaaaccaactccaagcacagatttgasgggggacgagcagggaggcacagtagataaagcctgtgagttactgcgcccagcgagaaaggggtcggtggagtcaaagagagaaggcactgcgtggggagatggaggcaggttgaaggcaacacttggagtccctatagtcctacaattgcagtgcaattgcccagaagatatcatgctaagaaaaggagggagcctcagccctcggcctccgaggagacctctggggacatctagggcagcttcccatccaggacagatatctgaaagatcatgaggctgggcttgaatcctgctgacaacaagaaacttactacctatgtcccctaccgctgctatggtccgcctcctctgtcagctcatggtatttgagcacctactaaatcagcaaattaatagcttctgcctgggggctgcttccacactccactaatagccaatcgctgggcatctcagagccgagagaggaaggaaaattggaaaatgagtctagaataaggggcctttccaaaatgtgtgcttatggcccagacactcctttaaccctaggttttccagaaagtctgttttgccccaggactgtggacagcattatgktttgtttggtgagctttcttttttttttttttttaggttgtattttataactgaatatggcatgtgtgaaaatatcagctaccagactctgttagtccaggcgtatgaatattccagatcacaagggaggtgtgactcccctgtgaattgcaatgcggaaggtttataaagttaatcatttagaaatctgtctttaaaatttaaatatttagattgggtcgctaggacacaaaaggcaattcctgtttctcactcacttaatttgatttttttttcttttggtcgcacaagttgtttttcaaagcctcattcctcgaatgttccctataggaggaatgtaattaaactccactggcctccccctgctgggaccaaacaggggccagagctgtagggagcataaaacagatatcctgcaaaagaatccttattataaagatgagaagagaatcaacttccctctggttatgaacaagaagctttagaaagccacccaggctatttttgcaatgggcttagtctccaagacattttaattagtaatttaagactggaaggaaggggataaactcctcacctccctggctataggcaagaacttcaactggatgagtaactggttcaagtggctgaaaaggagggaggtccagagggagggtggttccttaaaatgaaccaactttttcatgaaaatggcatagctagatatcccggcccccagtcagtcactgtttttgcagtcccacttcttaaggcagttctcacccctcaccagaggcaggcactgcctctctctgggacactcggctggcaccagagcaaagaagcttgtgctgagggatggttcccctcacaccgggccaacctggacttctctctgaccaaagagcatatgcctcccaccaagcgagaaggtggaaagatcctggcagggaaccccgagacctgggtgctagcatcatccccgccatgagagcacacggggcccctgagctgacacctgctggcaatgtgacgtggatcactcacataatcccttccttagtttttctgtctgtaaaatggggatagtaacattgtgtagctcataaggttgtcaccaagattaaacgagttaagaatacacgtgcaatgtttgaacagcgccagcattacgtacatatagctactctcattcgcctttctgtgactcagtttccttatctgtaaaagaaaaaggttggactagacctcttctccactgttattgatgatgatgatgataaatgaatgtttctgtgccagatcctaaactaaacaaaagttaacttgatactcacaatggctgtatgaagygggagttatcaccatccccatttcatcagtggggaaagaaaggctggattagtcagggatctccagaggaaccgaactaataggacagagacagaaagacattcattttcaggaattggctcatgtaatttatggagtttggcaagtgtgaagtctgcagggcaggctggcagtttggacaaccaggcaggagtcaatgcaacagtctagacacagaattctttcttcgccagaaaacctcagtttttgctcttacggccttcaaccgattggatgaggcacgcccatattattgaggataatctcctcaaagtcagctgattttaagtgttaaccatatctaccgaagaccttcccagcaaccctgggattcatgtttgattaaataactgcacacwatagcctagcaaagttgacacaaaagactaaccaagctaaataacttgagaacataagataataccctaggacagggcctaggtcggattggcactcacgtttcccgactccttagtctgtattcttttcaaccttgtctctaatattccatgattccatggttctgatgccattcctcagcgctctgctgttcttgcctgaccaagtggatcaatggtggctctggcatttctataaaggggatttcagggctgcctgctggggagggaggcttgaagctgtgtctgcactgcatcttcacagcactgagaaaatgccagtcattcaggaggacagggcagccctgtcctcgccacagtgcccgcatcttcattggttcacctttgcaggtatcatctgtgacctgtcatccaggctctgagccctgaggataataagtytccctcgaaggtcctgggtttgttggagctttttctccctcttgccatgtccttttcacggtccatcctctgagtttgtgaattatctttcttcgtggcccatgtggcacaagatgaagagtgcatgggcagcttctcccctgacatccctacctccctgacgcttaacccacatagggaagaacattcctgaaacagagacgtcacccagggttgctttctgccacagcaggcactctgcttcgtgcctttctcacttccatttgtaaatgatcttgtctccttccttgtagaaagcttttcagccattccaggctttctctttgggttccatccctctgggattttccacgaattgcatttccttgtagttcattttcatcattttccttgttagggaaatgcacctgagacattggcatgcagcctgattgcccccggcctcccctctgctcattgccagagctacctctgcacagaggagtcactctcctcccactccagggcctctgtcaggggccaggcttgatgctgtcaccagccagctcttcactgctgcccagtgccatattcatatccattgagacaagtccctgggaaatggttgggagccgggggacagccctgcatcctgagatcctaagatcagggaggttctccctgcactcccagctggaaggagactggatcggccaccctcaccaaattcccagattctctgactgaagcaagccagtccttggtttgaatggggaatcaactcagggttataaaatagacgccagccttcttgtaggtagaatctgacttcagacagcaaaagactctaaaacagcttaaattcctgtatatgccttctcctgtgcatgccaccggtcagaccaaaggccacacgccaatcaaggcccaagatcagccaggggtgtttccatgtcctcaagaacttttacaaactgtagctgattgggttccgcccctggagattcgatttagtgggtctggagtgaggcctgggcttcttagaagccccagcggattctaaaatgcagccaggaggaagaacsttgccagaatcccatgaggcacagatgcaaatgtgcatagtgacattgggttgcattatcaatggcaggactgactttataaacctccacatccttactggagctgctgtttgctttttagaaaagtccctcatcagattatcaggaagtcgtgggttttccgtgatcatgctgtggtcagatccagcccaaccagagagccaaaaacaaaacaarcatacaaaacaaacaaacaaacaaacaaaacccaaatccctggcaagccccacgaaatgactgctctgataacattcagcagacaagcctgtttgaaatcatctcagaatcataccagacccaaacccaagaggtcatctggtctatgcatcgactctaggagggtgtattagtccgttttcacgctgctgataaagacacacccgagactgggcaatttacaaaagaaagaggtttcatggacttacagttccacatggctggggaggcctgacaatcatggtggaaggcaaagaggagcaagtcacatcttacgtggatggcggcaggcaaagagacagcttttgcagggaaacttccttttttaaaaccatcagatctcgtgagacttactcactatcacgagaacagcacgggaaagactcgcccccatgattcaattaccgcccaccagtttcctcccacaacacaagggaattgtgggagttaaaattcaagacgaggtttgggtgaggacacagccaaaccatatcagagggtgaggggctatttctccatgttacagacaaggcacgtgaagcctagggacgttccatcacaggcccacaccttgtctcagaattaagaggaaatgcttctggctgccaggggtggggtggggtaggatgcagagcctctccctccaccaccayctccatccttttccctttctctgaaaatctcatttgatgattccccagcctggctgcaaattaaagatttgtagacctgaaagatgctaccgatggttatcagcaccaccaccaccatcgtaacagtaaacatttatggagcgccataattattcataataatttttatgtgttaaacaaatctgacctagctctataaagaaataggccctgttaaccaaaaatattggataaattaaaagtctcctagaagcatctgatgaaaggatctcaagttccataacacacggaccattcagtggtgttgtttctgggcttgattcactgtgggtcacttgaacgatgtcgggggtattgtccacctcccagtgctcagtctgtggcttgtggccagctgttcctctgtggggtctatgttggctgtgttaaggcctgctgcagaaacatctcatttctagcatgtttttctcaagcagtgatcctgtggggtcaagtcttcaatatcaaataatattgataataattatgatagaaataataagaggccaggcaccgtggctcacatttgtaatcccagcactttgggaggcagagttcaggtggatcatttgggcccaggagttcgagatcagcctggtcaacatggtgaaacccagtctctactaaaaatacaacaattagccgggcatggtggtgcacacctgtaattccagctactcgggaggctgaggcaggagaattgcttgaaaccagaaggcagaggttgcagttcgctgagattgcaccactgcactccagcctgggtgacagagtgagactctgtctcaaaaaaaaaaagaaagaaaaaagaaataaagaagaataataagaattatcagtcattgaacacgcgctctgttcttggtgctcttggtgttattccaggcaattctaacaccaattagatattttcccctattttaaagattaaagcaactggcgcagtggttcacacctgcaatcccagcactttgggaggccaaggtgggaggatcacttgaggcagggagttcaataccagcttgggcaatatagtgaaacccctgcctctacaaaaaaaaaaaaaaaaaaaaaatcaaaaattagctgaggctggtggtgcgtgctcgtactcccagctactcaggaggctgaggtgggaggattgcctgaggccaggagttggaggctgcagagagctatgatggtgccactgcactctagcatgggcgacaaaacaatagtcttgtctcaaaaaaactaaaaaagactaaagtgaaattgaaattcagagagtaagtgacttcaaggtagaggcagaaacagaggctggatttgaattcgatcctctggctccagagctcctgggagttatcttgggaatgactgcaaggtctgaggtagatcgttccaggagcaggtgcttatatacagtggaatggcacccactggcacaccrctaggaattctgttttcttaccaccaccggagccaggtctctgtcacggtgatgagaagttcccaaagtcatttctcctctctagggtgtcccctctctgtctgctgccactaaatccctaacgacattagagcgaataaatggcatttttaacttcagctttaagcaacaaagaaatactattaagtcaagatgtgtccatctttaccataaaaaaaaacaaaaaacttgcttcaataaccaataaacagatcaaacaacagaaaaataaatagcaaaagactkcagggctcgatggctcacacctgtaatcccagcactttgggaggcggaggtgggtggatcacctgaggtcaggagtttgagaccagcctgaccaatacggtgaaacccgcctctactaaaaatacaaaaattagccaggcttggtggcgtgagcctgtagtcccagctactcaggaggctgagataggagaattgcttgaacccaggaagcagaggttgcagtgagccaagattatgccactgcactccccattctgggcaacagagcaagattccatctcaawataataataataataataataataataataataaataaatagcaaaagaaagaaaaaaccctcagctaagaagtatactgttgtgttttttggggttttttttatgtaacatttgacaagtttacattttccttgtctgccttgggtgccttaaaataaaactctgtcaatatttccatgtaacattgggttttgcttttttttttcctcacgtaaaatccacatatcaggaattcctctatttattccgtcgcctgggtttctttccttgggaataatttatatgtcaaacctgtcatttatcgatttattgctgtacctagcagcatttttctccctgccctcaaaatttagcttaaagaccacttaataaggcctgtgcgggtcctcagactccagagatttctgctgatatgagccataatttagcaaaacaaatcctgctcattgcgggcatctaaatggtatcctgttaaatttccatacatgcttttcttttctaaagttatggcctacaactagaagaagggatgaaacatcacccctacctccacatcttatttcctgtatcaaatttcgaagcccttggagatgcaaggcgggtttccctaatgagttgagaatcaatgcgaatcatctgaaatgagaggtggcccgtgggtgtaatccatccctgctggtgctccaacttggttacacatttccagaaaccagcacctccctgttgtccatgtctggtcatcagaggcctctctcctcaggtgggataaccagagaccaagaaagaaacatgtttctctcccttggaatttctcttccttagtcattttcagaaagttaggagtcggcaaccttaaggaggagtttcctatcatctctcctccacttcctcccctcrtttcctccccgtcttctccttggagtccttcatcaatgtctctattttctgttcaggataaacaaagagtccctcttacctgcacaggcctcacctgccttccccccctgtcatttctgcagccagcctgtctcctgagcctggcctggcattctccaaagactccttaaggccacttggcttccggtctgcctctaggcttcactgtctgcaccagagtggaaattgtcatgtgccctcagcaacattttacccctcccttccagaacagacacaggcatttcttccacaagcagtattccacagatgaaaaaaaaaaattataaaagcgaaaccaaaaatactggtagtatatttttttcccttcaaaagaatgataatcatcagtaaaaaccacaacaacaaaaaactaagcaaagcagcctgaagataggctgaaagcacacatctacggatggcttgttgttgttttgtttttgttattgttatttttgagacacagtcttgctctgtcacccaggctggagtgcagtggcgcgatctcggctcactgcaacccccacctcccgggttcaagtgattctcctgcctcagcctcctgagtagctgggattacaggcttgtaccacccatgccccatgcccggctaatttttgtatttttagtacagactrggtttcaccatgttggccaggctggtcttgaactcctgacctcaggtgatccgcctgcgtcggcctcccagagtgctgggattacaggcatgagccaccatgcccggccaggatgttctgaatattaaactagctgaccggtggacattagctgtgctgtggaaaagtgaagcagaawggctttttatcccttgtgtatgatcatcaagacacaggacagcacagagattcaaaatacaatgcattccccttgctcgtctggtcargctcaccttcctattgcacagggttgattggttggaggccgccaacctctagctgaaaggcagagacagtctcccctgttatttcggtaccaagctgtgtttcttaggcattaaaatggagggaaagcaaccactggcccctcactgggatygttcttgaggattccagacagaccataagtaattcattgagtcgctcacaaagggcctggccctgaaggtttgtggctgcagcatccaggcgagccaaaggtgtcagtgccaccaaaatgcagagaaaactcttatcagaaagatgtcatttttttcccctaaatgtcatatatacaatttttattggagtgtgatgacagatagtgaataaattaacataaatttgcataatacaatacagctgttaatttatgatcatattaaaacacaaagttttgtmgtttgaagcagttaaaagtcttaatcttctgaaaatttccctcttgtttgttatttgtttatgagttacttagggttattagataaaatacaggcttctggttaaatttgaatctcagataaactgtaaataattttttagtgtatctcatgcaatatttgggacatacttatactaaaaagttaatcttattgtatatctgaaattcacatttaactgaatggttatattaatatttttatttgataaatcaggcaaytctgtatttcataagcagtttaacctctctctactggctcttctctggcagggcagaggggtgctgttttatggagaaaggcacttactgctgggaccttgatatctttagactgtgggggaggctggctctcctaggaacactaacagagtcaaagagatcagacaagagaggtgccagtgcaaagggggaaactgaggcaggcagcatgcctgggctttcttgacagtaccaggggtattatagccctgttttccagattttttggactacaatctcatcataagaaatataatttataattcaacccagaacacacatcccttataaatggaacaaaaagttttaggaaacatgtcaccttctatgtacaatctgctcgacatcctgttctagttgatttcatttctttaaatgccactcttaaccccctaaattgaattcatggattgaattcatggtcccctaaaggatcacagcccacatgttgaaaaacactgggttagagggtcacagttcaggaaaatgaacgaggaggttttttaaaatctactttacaaacgaggaaatgtatcgggtyccttaagagcctttccaggaaaatttttgctcatttgyggccaaactcgaaataaaacttaggtcccccaactcccaaccctgcgttttctggtttccttccaccactctttctagtatccattttcctggtctccaagttgtaatacacattctgggatccacatttacttgttttattttacataattatattacttgtatactatttccttatacttcatattcttctcaaatttccatgttttatatcatttctgatgcaaactgattacatcattgcttatggcacattcttgactgatatcaacattttaaaccaaattgtcttggtacgcaccctctgatctttggcatcttactgccctgccccatcttcaacctcggctcactattttggtgcctcaggaggtctcaaccatgaaccttccatgtgctctcactgggattggtgccatctgtgacataagaaaaacatagaaacataaaaacataagaaaaactattatttgttgtgatttgttctccctaatctatgaagtcggtagggtatctgttataaagattcccttctagagtcgagaaaacagaggctcagagaggttaagtgtttttctcagggtcacacagcaaatacagaactccagtcttcttgctgtgtctcttaccctctgtcatcaggatgcaggggctgctgagctgagatgcctgcagatgagtaaactggcgggaagaaagacaccaacccaatagatctccatgtattttatatattttctcacctactcagtctagattttcaaacaacatacagaactttctgggatcttgtcatcattcagtgtactgtcctctggatcctctccaggagccgcccactccgcacacatttttttttctagttgtcataaacaaatttcaaagaaagccattttcccagagccctttcttgtgactctaccacagttcatcctggtttgcagaatccaaactcagggcttccttccaatatttttattagttcagtagtcgatcagtttgcacagagaagtggattggagctccccttcccttggagctgccagtggagaaagtctcctccaaccctcaggctcagcaccactcagggccagtgagatgcacaaacagcatcttgcaggtaccacaatgccttcatcasttgtatcttccccgaccctgtgatgaagtaggatgaagatggctgagggtatggacgttgggcccacctccctggcttaaagctgctggaccccttacccggccatgtggccctggggcatgacacagttccccctaagcctcgcttcttcactgtttaaaggggataataatagcatctgctctgttagactgagggctggttaagtggaataacatacktagcacatagcctggtacccacttattttttttattttgctactttgtttcaaatcttcaaatcttcctattattccttttttacagagccatgtcagaaaccttagattcacgtcccttccatgtgtcccttccacatgtccctccttgacctgccacaatgcctctgctccacccagagcctcagcacctgcgttctgccccctcagtaaccagggtccctcacctgccactcctgggttgctctctccttttgaactagaaatttttctaccctcctgcccctccagccaaaattacctttttgatgtcccatttccccaggacactattttgtcctagggatcaaaaataaaaaaataagaaagaaagaragagagagagagagagagagagagaaagaaagaaagggaagggggaaagaaagaagaaaagaagaagaaagaaagaagaaagaaaaagaaagaggaaggaaggaaaagaaagaaagaaagaagaaaaagaaaagaaagaaagaaagcaggaaagaaagaaagaaaagaaagaaagaaagggaagggggaaagaaagaaaagaagaagaaagaaagaggaaggaaggaaggaaaagaaagaaagaagaaagagaaagaaagaaaagaaagaaagcagcaaagaaagaaaggaaagaaagaaagaaggaaagaaagaaagaaagaaaagaaaagaaagaaagaaagaaaagatcaaattaccaggatctgaggacctgggaggatttcagaaatcgctggtcagtcccagcaactaaggctcaaatgccctccccaggattctgctggagatcattctgccagtcrctccaggagcgaggggctcacctcttcctaaggcaggactttccacgaggctagaccagaccagtgtcctccaattaattcatttccctgtgtcttccatccatggtttcaaactctgggaccccaaagcacagtggccctttacaaagttgaaggctatgtccctctggcttctgcagcttttcctgatgtggcagggtttcaggtcccctgcccatccaccccccacccctctagcctgactgtctgtgtccctctagagggtgacatgccttgaatggcagcgaaccctggtgtgggctgatggtgtggagtacagagcggtagccgctgccctgttatcagctgcttccaaaggccagggtggtcgttagtgcatcattaataacccattatcgggttgtcatctctgaatttatctaaatttatctcamttattgtaaccctgtagactgataagccctataagtataaaatacactggatgaaaaagctacttcctattatttgttctaaaaaattaactccttcaagtaatctagagtttggtgaccaatttcttattttaccctcctcacatcttcaaaactcagcactggtgatttcacgtctgttgatgggattcatctgtccccctccactagactggaagctccccatagggtgagacccactatagcatcccccaatgtccagcacggaactggagcatcacaggtgccctgaggaatgaatgggtggacggcgcttacagactcgggtgccacttcctcttgtccagctccatgccctcccccatagtgtgtggaccatygggggcctagaactgaggtcctggttggtagcacccaggagcctgttcccaacatggccccatggcagggcctggtctccaggtgtggcatgaggtgctacatgagcattctgtgagcatcttcagggagaaaacaaagtgttggccaggcccaccggaacagcggcccacctaaacaggctggcgggcggaggagtgccacagaatggacatggggaggccttacaaggtctgtagtagcagaggtagtgaatgtttgttgagttctctctatgcgctagtgttattctaagtgaggtccatgggccacgctttttgctgactacaactctgtggagtaggactaggattatccccattttcctgggtgagaagctgaggctgccagagttaagttgactagggccacacagctgagaagtggtgaagcataaattgaaacttgggcagtctgactcccatatactttaaaagaaaatatttccatagattattggggaacaggtggtatttggttacatgagtaagttctttaggggtgatttgtgagattttggtgcacccatcacccaagcagtatataatgaacccaatttatagtcttttatccctcacccccttcccacctctccccccaagtttccaaagtccattgtatcattcttatgcctttgcatcctcatagctcccgcttatgagtgagaacataccatgtttggttttccattcctaagttacttcacttagaataatcgtctccagttccacccacattgctgcaaatgccattaactcattcctttttatggctgagtagtattccatcatatatatatatatatacatayatatatatatatatgtgtgtgtgtgtgtgtgtgtgtgtgtgtgtgtgtgtatatatatatatatatatacaccatagtttctttatccactagttgatgggcatttgggctggttccacatttttgcaattgcgaatttgtgtgcaagtttgcttttaaccactatgcgatcttggctctcaaggtggaaatttgatgtggaaagcagagtcaggccctggaagaatcccccaggctatctgtaagagctagaatcggtatgatgttctagaagcaattggcctgggcagtgccctgagagcttagcagtgcagtcatgagccagcactctgcctgggtctctgtcacagagtttctcgtgcttggctgcagcctggagccaccttggggagcttgatgcctggggctccccacggattccagtgtcatcggcctgggcatttggcatttgggatattcacaagctccttggtgactccagggtgcagccgaggttgagaaccattgggaatagaaaagcaagaggaagctgttctcacctgccctttccacaccagagccccagggtcccggggagactaaagctggggtctatttctattcccccaaccaagacgggagcttcacatccccacayactgagaggccagaatgggtcagaccagagtgagtgtgctctggctaagactggccgacagctctgytcccctggggtggggactggacgtggccctttggtttaactgcattttactctttccagcctgtctggccattattcttgcaggagcacgcaggactaaagtccccttcctcagcaccacgcatgtcccatctcaccctgtgtcttccaacttcacttgccataaatcagttgtcaggacccccgaccctaaaacagtcacctaatgataaatcatgtttaattctaatggaaccctcccgccaagactactcatcagagaggaagctaattcgcagggatatgaagagctttctaaaattagttccagacgttttttgtcttaaatctgtattatggctgccctatttttaatttactttttgaaaaaccacattgggacactaagtaatctgggggcccaaaagactttgggggccacgggaacctcccaggccctagggggcagtagcaccaccatgcagatcaccagttccacaaaagaacggaactccaccagtacctagtgttattagtataagttttgggaaagrtccttcttttcttagctcattagaaaaacaatcacagcatcctatggactgggccaaagtgggcagacattgcagtccagcccaaagaggcctgtcccagcaggacgccaggggacagggtcagaaagaggcagcccacaagctgagcacagctgcagaggttttagcttgcttactacatttgaattaattgccaaacttttaaactcaggggaattccrcaaaaatctaggtaccagcttttcttgaagacaacggaagctcaggccaccctgaggccatcacctctggcagtcacctgccaagcacgtggctccagcttagcccgagcgcctccacctgccccgtcaaggcccagatgcagtggcccttacccatcacacttgcgctgttctgaccacagactcacagtcatggtcccacctggccccatggacatttgggtttgcatcatcatctaatgacacagtgaagctccttggcctaccagctccctttgtgttcaccttgaccagcccccagctccttgcttctgcatcttgacttctgccgtggtcctgcccagaaccctgagggctgtttctcttccctactcccctccggcttctccttcctacctttccacgctgcaggatggggtacttctgcttgcctcagctgcctggcccctccaaagcctcctttgaccatcagcccagcttgcatggatgcccgggacacatacagcactttcttggtcttggtttacaaagtagtctgccccagtggtcccaccacacctccaatcaactccagaccccagccagccacttgaaaatctgtagtccaggccagagggcaaaaggcacagtcgaggacaaggagcaggcatcccgtgtggcgggagcaggaacactcttgctcagggtgctgtgcgatgggccattggtaggtagtcccagctggtctggygtgtgaggggagaggcaggttcacccagctgtctgtgccygggcagggcaactcccgaagtgggctgagggagagctctccgtgatctctaaggagggaggcagcgcattgcagggttagcaaacctttagaagatcctcccggtgttcttcctcccgctcctgccctgcccatagcagaaatcaacaacacgtgggcactgagctcttttccagaaactttccaaagagacccatgggtctggccaagaccctcaggggttgccctcattggcctggggacagtttttsagcgactgctctttgagaagaagtcagcatcagagggagtcagagaagaggggtaagcaagctaggttggggagctgctacccccaaatcagactgcaaagacaggcaagggtcatggccacttccgtgggcccagtgccagacagctccacagaggctcagagagggctgaagggccaagcctaaggaaaacaacaaggctgaaactccccatgtctaacgacatcgtgagcgtggctgcagagctcccacatggcttcctcctccttcccaaggggctgccccaccgctttgccctcactagccagagcaatctaccttgttcactttgcccaagacacagggaggacccytgtggtctttgcaggggcttcacccagttgagctgggaagagacctcacagcatcctccccatctccctggcccgggtttagaatactgaagacacatagtcctgtcctccgtggcctacgcagatccttcctgttcctgagatctctggccccatgcgggcccatctctgcattcctagcttggtggatgccctgcctatctggcttctacctttgattgttcccttggtcactccgatgccatggtcctatagcaatcagggtgctgagtgagtccctgcctgtcctgccttataaggaagagacaattatttgtgtcctgcccatctttgctcatcattgtcatgggttttagaatcaagccgacttggcttttcactcccttaacactgtgagctcctccttatgcaaaacaccacaggcctgcccgccggccttaagcacacacccttctgagcctcagttttcctgtctgtaaaataaaactcaatgaaatgacacaagtgaaactcacctggtgcctgccctcttctcataaatggcccattgcttctgttctcctctcctcccccaggccaggcctcccctccctagtcctcatcttatacccacacctccctgcccctcactcagggccttggctctgaagggagaccccgaggccatctgaaagtgtgagcacagctggcggtggtggctggcatccaggggacgtgagggcgcattcgccccagcgcagcattcctccttcctaagcttgcacagggcctggtattgaagggcagcagattcattccagcatgactactgcagctacctgtgtmtcctggcggaaggggcagcctcaggagtgtggagttcagggatccagctttgacttggccacgcccagagccagccagcctcgagcacctgtttcctgtctgggggcacgggaaccctcctgtcctccagggaccccagcctcctcatctctgctgggcagtcatctactacccctggttctgacccctgagacctcttgtcctggagcccgcagggtccagctcagctgtgccccctctcggggccgctctggtggcttctttgctgccaccctccccacccccggcactgtgctctccctgcccccactaccactctcatctggttgcccagtccatgattgtgaacttgacctctacccctggctgcctgggcctacgatcctgcaaaaacccctccaaccagctggccccacccctcaggacttccctcctgtggcagagtcacctgtgacacctggagggactccagtccagtgtgtccccaccttcaggctaacccccttggagaagcctcccgacggtgcaggcacgggggcacagaggcagcaggacattgcaggagcagagacacgaagacaaaagaaacaaatgattccttaagatccatggccaaaacaaattgccgcaattaacacgtgccactgccacgatctatgggctgaaacgtggctggaacgacgcagaagcagaaaccacagagagcgtgcgctccaataaaacggcactaaatggcacggctgtgatggaactcgtttcgattttgttccaaaaccttgtttaagtgcgtttattgtttctgtgtgaaagaacacaaatgctttttgaaaattgcttcagcataagcctcaccttctccagaaagtctttctgatccctcccatccctaccccatgcaggtccgtgacccccacgatgcccccatatgttgcccccctatgttgccacggtgcccacacttccctgtcaccaccagtgtcctcctggcttctccacccccagggactgtgcatcacccgtctccaccccaccccagaacaatgctctgtacacagcagacagcaggcagcaggtgacacaggcccaatggaatgactgtcaaggttaagggagaggtcatttatgaacatcaagggaggcacgcaggctgctaaggggacccttgcagaacagatgaaattcttattagaaagagtcagtgttgatttctcaaaaaatctatcaatcaataaaataaaagcataaagacatagaaacacataaacagagaatcgttttacatggaagatggggagtggtgacttggcctcatagggccataatcacccttttggggttttgtcccacattagaagagcagccccatagcagagataagaaaaccaaaaaagggtaacaaaaactgggcacagagtcaggactggactgaagccccggagagcacgggcagctctctagcaggtggggcaagagggactttagctgggagcacttggcccccagcctaggcaccagagctcgaggggagacccttcccattccctgagagatggagtatgggtctcacttgcaggggagcctcgtgggaatccctcatatgggaagaaggatggcatggaatggcctttctctcccccaacgcccagccaagggaggcaagccctccctgtccgctctagcaatatggcacaagggggtatgatctgccagttctcccttgagaggcttggtggggaccacctgcaggccagctggcagccccccttcacctgctcacaactagcaggccagggggtgaggcatggaccagcatctccgctgctttgagcaatcatgaaaactccaggtccatggaagataagaaattggctatcaaggctctgaggcatgtgctatctgcgatttagtaaatctcttcccacccccaaatttaattttttaaaaaacctccctcctcaagaacttcattctcatgtatcctaatccaccccgccagctcccagcagaggggagggccactctcttgggtccaaaggcccacactagcggggaagctcgcggagccatgtctctgggggccgtttttactttgttttgccactgtagaggccactcttggcaagaagcctttttcactaaaagccatcagctgcagaagaaggcaaagggctgaaatagcatcaggtggaggaggcggccctggagagaggcctggtttccatcccagctctcccaccatctgcctgtggcctctgcaagctccccaagccctgggggcyttcgtttcctccctgcaaagggagctgccctcagaagcactcagctcggttcttggcatggggagtgattagctctgcacaaacctggtagtttcacgagaagccatgtaaggtagagaagtcgctgaaggcatctccctctcagagttaaaaggaaacagaaagactggatcttgtgtctcttcctctttttaaaaagggaattaggcctggtgcagtggctcacgcctataataccagcactttgggaggccgaggtgggtggattacctgagatcaggagtttgagaccagcctggttaacacggaaaaaccccgtctctactaaaaataaaaaaattaaaaacaaacaacaacaaaaaccattagctgggcatggtagcgcacacctgtagtcccagctacttgggaggctgaggcaagagaattgcttgaacccgggaggcagaggttgcagtgagccgatccagcctgggagagagtgagactcggtctcaataaatacataaatgggaagtcatatcatcacgaggtccccacttaccctcatgacctcatctaaccctaataaccttccagaggccccgtctccaagtatatgatcatgttggggaatagggtttcaacacataaacctggggaggccggactcacacattcagtccattgcacaatgtatcaaaaattctaattgtattgggcaagcctacactgcccaattgtaagcgaagtccctgaggccggagaaatcaaggtatccatcagtgaatacagggtattaagaaatgccaaagcttactgctcaagttcatctcctgctgaccctgcggccctgctgcctgggcctagaatggacgcacttctccacaaggccttgtctttcttgagattctcacagtgtgacccgagaagcatgctccacaatttcttatcaattgaacactaaaaatcccatctagctatgggatgcctagtttctcctcctggattttgtggttaaacccttctgtctccaatgcaatgtagcagtgagcacagctctggacccgcatcccaaggcctgaggtctaacgctgcctctgccccctcctttgctgtgcagcttaggcaagtcacttcacctctctgggctgtggttcctcatccatccaatgggagggttgaactgctctttgtttgctttgctttgctttttctttttctttctttctttttttttttttttttttgagacacagtctcactctgccacccaggctggagggcagtggcttactgcagcctttgcctcccaggttcaagtgattctcctgccccagcctcccaagtagctgggattacaggtgtgcacaaccatgcccagctgattttttttgagatgaagttttgctcttgttgcccaggctggagtgcaatggcgtgatctgggctcactgcaacctctgcctcccaggttcaggtggttctcctgcctcagcctcccgcgtagctgggattacaggcacctgccaccacacttggctaattttttgtatttttagtagagatggggtttcgccatgttggccaggctggtctcaaactcctgacctcaagtgatctgcctgccttggcctcccaaagtgctgggattacaggcgtgagccattgtgcccagctgctcttcyctttttactgtcctatgactggtctcccaatgccagctgagagtgttggtctgatctcttttcttctaagctggccacacaaatggacctcagttactcagtagcccttaaaatctggtaccagtcaccatttaggcctctggacatcatccttgggcaaaggaggctttttttttaagcttgggcctagccctccccacttatatcctggactgtgaaaatggaccgagtgggcaatagggaattcaggatgagctggaaaaaaagaaaaaaaaaactcctgctgcaataaattacatcacagtggagatctctttctacccagaaaattctgagcccagacaatggctyatttatttcagacaatattcaatacaacagaattccaggtcaatagaaggatttctgcaggttcttagagttggtagcaaagggatttaacccacggagaaaagagagctgttcaataatagattcccaggcgtgagggaggccttattaataaatccatcggtggtctgctgaaaatgctgccccctcccttgcgggcatcccacctgacgacagtgggggactgatgcacccagggccctgaccagggaggacgtttgggtaaatatttgggcagagatggctgctgctagaatggtgagcagagctggggagcgcaggaaacggcccctttctcccaggccctcagatgagacatttttataaacatccaggcaggcagcctctgaagactcctgggctttacaaacacatctcgtattctatagtcagctgagaccatgctttgagcatgggcggtaagaggagcaggaagcaggaggggcggggaggggtctggcaccagctttctaaatttaacatgcagttgcttttaggccagtggataaaaaataaattccagtgcttaaagctcttatctttgtttaccatttccccaaacagctagtgacctgctctctgactcctacagcaaatcatcaacragatgcacacgaagatgagggatgggaaatgcaggaggggtgtgcggagggcaagttgatggctctccgccttcccgtcacgtttatttggcctggcagagtgaccaggatctgctaaggtcatgaggctgtccctgggtgggtgggggcgtggccatgctgcatcagaccrgtccagaggtggagggcaccttggggtctctcgtgtggctctcctgttgatgagggacctatgaatatcccacagcgaccttttcagatgctccataacctcgtgtgaaaagccccggtggacctgggcttgcctattgcattgtgaagttgtagtcctttgaaaatcctgccccacgtggagtcagaatctttctttctgggactgatgccatggggcctggctccacccccacaactgcatggcacagcactgccttttccttggccatgggctcrccctgcagatgggtgatgatgcgctcctgcctcccttcagtttgttctgttctcccaaattctttcagtgtgcctggtagaagcagtctgccagtctcccctcrctccctctcattcatcccctctctaactactcatcctgcgaccccactgacttggttttggccttgtccctgccacagttgacaaatataatggcgcgtcttcttcttcattattatcattattattactggcaatcatagtccactctgcctcaaactcctaggttcaagtgatccttccacctcggcctcccgagtagctgggattacaggtgcacaccaccatgtctggcattttttttttttttttagagatggggtttcactatgttgtccaggctggtctcgatctcctggcctcaagcaatcctgccacctcagcctcccaaagtgctgggattacaggcgtgagccaccgtgccagccatcaatggtctctcttagtcttgaatctcccaggcactgtccaggagatctgagatgttttccagggtcccttactttccagttgccctgccaccttcccctgggaagcattaaggttcaatgcttggctctgtgcttgtttttcttacccctatcccagaggactcatccccgtctgtgcgayaccatctccccacttctacrccaagctgctcacggtctcacccaggtggggtggtggagggggcctccagcaaaatcctgcaaaagctgatctccttcccctggaagatgctgccccacccatgtggtcctctttctgtgtttctctcagccacttaggaatgaaaccagggaatccctttcatctctcttcattccctgacccgttaaatcccaacaccctcacctcccctggtagagcttcctttatgacagtgattctgaaatccaggctgcatgtgataatcccttgggggacttctaaaacaataccaattcctgcaccccaatccagaccgattaagtggaaatgttttgggatgggccccagcatcaatagggaacagccaagatagacagccactgctgataaggcttctctctttcagccccttttcccattctgactactggccttgtgattggagcacctcacttttgcctggactattgcaagaacctcctgtcttattgacctatttcccaactctttctacctcagccatcctacatgtcgttgtcagatcacacaaagccattttcagtatgttatcttgactcatcaaaaaccttcagtggctccctattaccataaaaataaatctgtgaatgaacaaataaatggtttcccaaatacagagtaagttctatatggcacagaaccgtatcttatcccctctctttccctgcccctcaccccacacactctgctaatcggagtaaatagagggaaccaggatctgtggggtgagtgaacaaaagcattttctctgcaaattaaatgtggtccactcacttcccagtgcagagaaagtgggctaggtgatttaactatcacttacttaggggcttatttctttcaacatcatatacagtcagctgtgaatgttccatactaatggaaaaaacagaatcctaaatattaccaaacagcagataattcaaagactcgaatctagttgatgttggaatgcgtttttgcttatgagtgctgagtgcttgtgtctgataattggggcaatttttaaaaattaggtaattagatgtgttttatttgttcctatttccccctccccccactatacacacacactatatgaataaataactcagctcccaaaacaatgccctatttctttctctcagtcctttcctggaatagagatagtggttacatttcagaatattagcaaggaagggagaagaaactggggaggagcctgcagttagagtaaatagaagaaactaggatgtcaacaggctgcttttcaactgattcactgttaaaattttaggcagtgtgaacaacctgtctgtcaaactgtttgcaatatctactaaagctgaacatacacatccctcatgacccggcagtgccatgcccagatgtacacccaacagaaacctgtactctgttcaccaaaagccataaacaagaatgttcataaggctttattcataatggcccccaacctgggaacaactcaaatgtccattgacaaggaaaaggatggataaatcsgggcagctcacccaatggagcaccaaatcatgaggatgaacacaccacaacacacaacatgggtgactgtcacagacatgaaactgagcaaaagaaggcagaccgaaaagcctgcatggaaatatttcatttataggaagttcaagacaaagaggcaaaagtaatctctcgtgttagaagtcaagacagtggttactactgaggggcatgtgaccgggagaggccacgggtgtgcttccaagtgctggaaggttctgtcttggtctaagtgctggttacacaggaatgcttacagtgtgaaaattcattgagctctaagtttgtgtttgtgtcatatttttccatatgcgtgttattcttccataaaatgtacaagaggaaaggaagggagggaaggctggagggagggaaggtaagaccaggtaggcccaggtaatggaaaaggcttggaatttgaagacctggattcagttccaactctaccattaactggccgtgcgacctgggacaagtcacttcacctctccaaatatctggttttttttcatctataaaatagacaataaaagctgctctacctacctcacagtgtggttgtgaagaccaaatggtataatggatgtaaaaatccattggtgagcaataaagtgtttcacaaggcaaaacactattattattctagatctctgcagacagcaatttctgcagcaggtcarcactgtcagtgaagctcagcccagagccatcatggagaagactgatgccccgtgggttgtgtgtttgtgtgcgcacgcagcctggtttatgttttttcattacatctctgcacctaatcccttaatggcctgggcctcagagtacaaaaacacctggaaaaatctctgtgtttttatgagacgggttctgtccccttctaaagcaggtataaatagatgccatgtacactctcttaattactttttctcgagtatggatgaatttcaacatctaaatctgccaaattattgaagctagcacagagaactttctgggcattggccagggaagccagcaatgtggatggaaagatttatcacccsctctcataaccaaacctccatcgtatctccctgcaagccttgaaactgctcactggacccactcagacaacagagctatgggatctagaaggtgaaatgtcagagctcagagaacctcagctccctcccaaccttgccataagaactcagggctggccgggcgccatggcttacgcctataatcccagcactttgggaggccgaggtgggtgaatcacctgaggtcaggagttcaagaccagcctggccaacatggtaaaacccygtctctataaaaatacaataactacgtgggcatggtggtgagcgcctgtaattccagctacttgggaggctgacgcatgagactcgcttgaacccgggaggtggaggttgcagtgagccgagattgtaccattgcactccagcctgggggatagagcaagactctgtctccaaaaaaccagttgcaagggtgaggggctttgcctctggtttatggtcagaagggcaaagcgaaggtcaccccattttccacggcttggtttcatattatagtcccacggtccctggagaatcagagtgaatggaaatctttattcttcatatggctgtattgccccaagctgtcctcgtgcttaagggatttccagctccggcttctagagggcaagggccagcatcacttggcctacttcttagtataagaccaagtctagtgacagctgggtaggcataactactacagatgctgctgttcctactgctctgaagaagaaaactgaagccacctctgcttctatttcctttaacaacatagaaaaatgataatttttctattaggtccgtgaatctccaggaaaaatctttgtgaaagcaatgacatttttattttctttttctcatttatactccagatgacatctgcacacacacccagtgtgtggcgtatgtgtaggtgtgtgactgtgtgtgtgtgtctagctttcagagaaaatgatacacaaaatgataaatatagaaaagagattaataggagagggcagtactgttatttcctacataaaaggatttatcgatagattgcccatagagttagttccctaaaccatcaggttaatctattgtatttaaatgtatttaaatattgggccaggcagagtggctcatgcctgtgatcccagtactttaggaggctgagactggaggatcactggagtccaggagttcaasacaagcctgggcaacatagtgagatgtccccgcatctctacaaacaaacaaaaaacaattagacaggcatggtggcttgcacctgtagtcccagttactctggcggctgaggcaggaggatcgcttgagcccaggagttcaaggctgcagtgagctatgacagcaccactgcactgtagcctgggccacagagcaagaaaataaacaaacacatattggtttctagatcctaaactatatgatggaaagactaagagaccaagaatcttaggaataaaattagaagttactgcccattgaaaatcaactacatatgaaaaagtctcccccaaaatgaagaaactctggtttgagaatgtaaatcactaggtaaagattctgtttattttctttatttccatgtttcccaatatttaatttkcaaccctctaagagcagttattttataaaataagtcccagctgaaatgaatttgataggattttagaatttctttctcccttaacacatcctattagcctagttcaatagagagagcagagcgcctcatgttgaaataagctttcccgccactgaatgtgttcaaacagaaatatcacctgcttaggaggtactttccagttgccaaagacttccaccttcatcttcttgttcactctactctgcaagatgggtgggacagcattacagacgaggggtcctgtagatactgtcctgacgactggcccaaggccatggctaagggttacagacccggaacagaaccctgccctttgcctcccttgtgggacccaaagccaggccaaggtcaaggggaggsgctgcagggggggcttcctcattgggtgtggacagcaaaggttgattttgagatttccccccagctctaattctcagtaatttggcctttgaaacaggaggcagagagaaccctgggggatggcttttcatgttatcttttggaaacatagaagcttcaggtgcttcctggcttgaaataagagaatattctgctcagtcccccacatttttgagacactccaggcccagcagacccacagcaccctcactagctgttggtaacgttggtgcctggatgtactgacagaggaccaggtgtgccaagggcctgtcacccaggctgtagtgcagtggcactatctcggctcaccgcaacctctacctcccaggctcgagcaattttcctgcctcagcctcccaagtagctgggattacaggcgcccaccaccatacctggctatttttctattttgagtagagatgggatttcaccatgttgcccaggttggtctcgaactcctggcctcaagtgacaccccctgccttggcctcccaaagtgctgagattatgggcgtgagccaccgtgactggccgataagaattcttttctaaacatgaccacaataccattatcaactaaaaccaaaatgaatgttcattccttgagagcatcaaatatcctgttggattcacagttccctgattgattcatatttgttttaggttggttgcagcagcctctgaacaaggccatccacttttcactggcttattctcactcatcctaaaaatctcagcctggacattgtcgcttcctcctcacagagtccctgatcccaaatgtgggagatgtgtgtctctcatctgttctcccatctcacccttatccacttgtttgcatcctgatagactggaagctccgagaggctaggacatgtccgtgcattttaaagttacgtctcccgggcctagcacagtgcctggtgaatcatgctcgccaattccatatgtattccttgaatatgtaaatgaaggatctcctaaacagaactggttttgcattcctcgtaagcacattcgataacactttacacatccatgtcatgatttgtttaggaatcggtttcctcaatggacagagcctccttggacccccagcacctggtcccgcacctgacccatccaaggtgcccgctgaggaactgctgaatgaaagaggacttataataaattctatgttgagactttgggttcacaggccttcctctctgggcctcatttttctcctctctgtcaaggaaggatggctgggaggatttccaaggtcctttcccgggacggggagtcctcatttagcatgcgcttgttgccctctgctggcagaatttgctcaggaccgttctgtccctgctattcctgaaagctgcagacaaagccagcaactgctgggtggaccagccagtgagtgggatagggacttgagttttgttgtctcgctggttcgactaagacatggaggtgtgtgcgtccttctgcctcatccgttcattcctcaggtgtggagaagcgctagggtaggtctcagacagacagtcggaaagacctatgcccctgagtgcacattaggacagccagggggctaaaaagggagarctggtgcccaggccccacctcagaccaacactggggagtagggcccaagcatccatctatactaaaacatataaaaatctggctgtttctggctgggcgcggtggctcacacctgtaatcccagcactttgggaggccgaggcaggcggattgcctgaggtcaggagttcgagaccagcctgaccaacacggtgaaacctcatctctactgaaaatacaaaaattagccgggcgtggtggtgggtgcctgtaatcccagctactcgggaggctgaggcagaagaattgcttgaacccaggaggcagaggttgcagtgagccgagaccgggccattgtactccagcctgggcaacaagagcgaaactccgtctcaaaaaaaaaaaaaaaaaagctggctgtttctaacatgcagccacatggagaactgctgaaccaagatggtctttacatacgtatctttttgtttgtttgtctgtttgtttgagatggaggttttgctcttgatgcctaggctgtgatctcagctcactgcaacctccacctcccggttcaagcgattctcctgcctcagcctccagggtggctggggttacaggcacccaccaccatgcccagctaattttttgtacttttagtagagacagggtttcatcatgttggccaggctggtcttgaactcctcacctcaggtgatccacccacctcggcctcccaaagtgctgggattacaggcgtgagccaccgcacctggcctacatgtgcatcttgatctaaaagcctagaagcacagttaaaaagagaaaagcctatctagggaaagagtaaagactttgattttctaatacaaaattcgcttagcctatctttaaaaattttctttctttgacaaaccgtgacaacttacaagccatacagttttcttcggggaaccaacaccatttacccattagggatgctgcttccagatccagtttttctttttgagatatagttccctatttttgtgtaccgcacctctgtttcttgtttgatacatgcatattcctgcatttgttaagattcgtttggttgcagacaatggaattcagaatgttgctaacttcagctgcaagtgagaacttgttggaagggaccaagatgccacccacagggttacctgccaggagcagatggcaacaggaactggaactccatggggcaccgagaaatggtctctctgtcctttgcttctgctttgttgtatacatctgattcatttcttctttcttgaggccaactgctgttttctgctcattaatccacaaggccgaatgtggccaacaatgggtctccacttccctgtgttcaatcgccacctgctggagaaaaacttttttctttgtcccagatcgaaatttccagactggcccctttgggccagtcaatcttggcctgcagggctggctacaggatctgtgaggcccagtgagaaataaaagcgtggtagcctttattcccaaagcagggggacrtgtccatcgtggtactcagcgagcttctttgtttcttctgcagtctctttttcgacttgtcatggtgctttttattttccatttactgttgttctaagtaaagaaaactcaatgttaaattattagcaagcattttaccattcatctttatatcaaacaatgccagttttaaatgtaaatttcagagcgtttaacttatatgcagaaccactgaaattacacaattggtgtttgtgacttgttggccagaagagacaaacacaaaccaaactcataaagattggaagcaggaagacaagttgcctccaggtttgcccaacggggatgttctttcaggcctggacatactggatgagcggggggagtccagacccttccaggcatccaagggccctgtcagccaccagacacatgcactgagacccagccagggaggcaggatctagggaaattggtccagctgtctcccctttccacagccttccccagccagccacagcagactaacctccaaggatctctaaacctctgtgctatgacaccctcagtacctgggctaggggtgggcagaggtttgcccccatcgagaaacagcctccggccggccccgccacatacactgtgtgctgccagcctagggcagggacggccaccaccatgccaacccgagatgctgcagggtgcatgcaccctatcctggccctctctgtgcctgtacccaggaccctgtgaagtgtggacagcaacagtggccataggtcagggcagaaagggggaagccaggtggagagcacaggcagctgagagctggtcgtgggaggcagccacaggtggagccatgcataagccaggcttccaaagcacagattcaaagataaagttacgtccgggtgcagtggctcacgcctgtaactccagcactttggaaggccgaggcaggcggatcacttgaggtcagaagttggagaccaacctggccaacatggtgaaaccccatctctactaaaaatacaaargttagccaggcatggtggcagatgcctgtaatcccagctatttgagaggctgaagcaggagaatcacttgaacccgggaggtggaggatgcagtgagccgagatcacaccactgcactccagcttgggcgacagaaaaagactctgtctcaaaaaaaaaataaataaataaaagataaagttatgaagactctcaagacagcgccacagaggattaacccccgcacagagcccttttcattggtcacttgctcagccagctgccccagtggcctgtgatgggagtgggaagtgtggggttgggtgataaccttctaaagttagaaccgttcccagaaatgcagacgggagagctttgggaaaaccatccaaaccttgttattttttatgacaaagtaggaatgccaccctggccctctaaattcataaacagtcacagacatgggattaaactacatataatttctgcaacgtggcttataggcatcattaaacagctgcaatatgttgaatggctatgtcatcatagattagctacgatactggctatggacttcaagactccatgtgtcctggcccctgcccttccacccctctgacccgagatgcagttctaacaggttcccgggtgatgctgctgctgctgacccttgcccatcccggagctcactttgagagctggctgagatcccaggcagggtggccagtggctgctccagggctgtgaagggctccccctgcagacggaggaactaggcctcccagygcctgtaactggaacgttggcggcttgagaatggacttgccctgaaggccggcctcctgctgctctgggaaaaagagggaacagaagaaagcaatccgccaccttggggactcctcctggattagcattatctaggtgaagaaagtgagaccatcacctaccaaccagataactcattccacctctgtgggcaaactggcagagcagcaaataagcttccttaatcccagtgcgcccacaccctgctcaagagctcatgggcacgtgttcatcttcaggccaaagatggggagccagggagtgacagactgtcactccaggagagtcacccgggggtgttaggatccccacatttgcaccccctgaaatctaatcagcattttccagctgttcctaatctgacctgtgcaaatggaatctcattggaacttgcatttttcattatagtaactcatatggcctctgtgtttcgcctgttcatagcctttgaccatttttctagctagttgtcttttcctactgactgatagtagctctttggtttttgttactgttagtcctttatagatgtggcaaacttttttatttgctatttcactatttgccttttgacttcataatgtgccatgactacccatgtgacaggctctttgagcctcagttttctcatctaagagatggggaaacagtcaccacactggcttagtggagcatcaaatgcggtaacgtctatgctgcacttggtcggccacatcgtcagctcccaataaatgctggcggctgtggttgccgctgcagttttataaccaaacttctctgtattacgaagacccctgagccccaggctagcaccgtgaaatataagcacaatagaaccactgagcgccaatcagatgcaatttgggtcataccgactttccattttgtggggtttctgtttaaatgtttgccaaagttggaaacgagattgaaatttaaggaaaagacaaaatgctgtgagatttgggctaacacgaacttctccctttgtcacgacccctccatcagatggcccctgagttctgcagcctcraggaagkcctgccctatctggacatggtgattgcagagacgctraggatgtacccgccagctttcaggtgtgtggtagccccctcccctgcccgagtccccacctcctacccctaccccctgccccagcctgcaggtcagggccctcctccatcagttaccacttgtgtttctggagggcaacgcctgagtcctgggttcctttgtatccccatggcacctcagrtatctggcccgctttcctacaggttaacaaccttctcaaagcttcacaggcattttcttaacaccgccttcctccccagcccaagctggccctttggtctcctagcctttgctggcttttgccatttcccctgcctgttcgttcattcattcattcattcgttcattcattcattcagcaattgtttattgagcatctactctgtgccaagcattgggaaatcagctgtatataaaacagataaaagtccctgactgatcttggagctggcattcagacagtaggggactgtctgagtcctgggagctccttcctgccatccaacacccccagctgtcccatcctggagctccaacacgactcaccctccaaaacgtctcactgcccctcaagacgtctgtgttgggcttgcctcacctggtcctccctgcccttcctcctcagcactttgagctgtaactatacacttcatgttatattcttggacacatatctgccactccatgacatttcactaatgtacacaccaaccagccggtcacaccaacctgtgggtatcttgagagcaaaaccaactattgtgcttcgttcaaactctcccaaacaaggcactccatagagaagggcatcttaattcatgtccccagacccctacagagagtgaagtaacagccagatttcaggctctagaaacagaagcagcacaaagcattaaccgtatgtgataaattccactcaacacttttatgaattaacagatcacataaaccatatggaaatacctttcaccatttttaaagacaatatgtggatgatttgagggtatctcaaaacgatatttcaacacaaaagcattacaaagaatgcaattgtagacattgtccaaatgttcaagtccagaagcaaatacagaaaattccggtggcgtgattcgaactgcattgtcctcaagcacacaaggttttgggtctcagtgtggaagcaggccagtcactcaggggctctgtgccccctctccccatgccagcattaagacctgatgtgcagcccttccctgatctcctttggagcctcttgcaaactgtcatccaattctttcttttattcttttttttttttttttttgagatggagtcttgctctgttgcccaggctggagggcaatggtgtgatctyggctcactgaaacttctgcctcttgggttcaagagatcctcctgtctcagcctcccaagtaactgggattacaggtgcccgccactatgcctggctaattttttgtatttttagtagagacggggtttcaccacgttggccaggctggtctcaaactcctgacctcaggtgatctgcctgccttggcctcccaaagtgctgggattacaggcgtgagccaccaatcccagccttatttttttcataattgatatccagctttcttccaaggggattgtgggaagctggtgtacatgttaaaatgaagttcaagataaagcattcagggatcaaatagaacaaaggccatttaaaggaaagaaggccttacagggccccagagctggctggtagctggggtccagctgtggcttggtgaccagggctcctggccaagagggagagcagccaagccaaacaggtgtgttctccagcaagaggacagcacagaaactgatcaatggacacagtacttcctggacctaaactcagccacgaatccatcagacaagaccttattagctgtcatgttgaataacaaagggrttaggctcttcaacatgaaaatgcggtggccgattctccactgacccgttataaacagcagagcagaaaaggaagttggtgcaggtggaccaggaagctggtgatctcacctgaggaccagacagaaactagagaacctgggtgaagtagttagaattcatctaacaggtctagagggcacgtcagaagaccatcttggccctggccttggcatactgcgtgatcgtgagcctcatgctgctccgtgcctctccttcctacgggttaaatggggacacacacctgcttggctggccctgcagaagcaggcaagaggcagtgggtggcacaggtggaactgtagtgcccgctcagctgcctgcagcatgatgtgtgcagggaggagcgccggcactggtcggacagtggaatggacagcttccatccagcctcgctctcctgagccgccccttccccacacatgccccacacccgccccacaccttccccacacccaccccacacctgccccacacccgccccacacctgccccacacccaccccacacctgccccacacccgctccacacctgccccacacccaccccacacctgccccacacccgctccacacctgccccactcccaccccacacctgctccacacctccatacctgccccacacctgccccacacccgctccacacctgccccacacctccatgctggccccatacctgctccacacctgtcccatgcccgccccacagccgccccacacctgctccacacctccatgcccgccccacacctgccccacaccttcacacctgccccacacctgccccacacctgccccgcacctgccccacacctgccccgcacctgccccacacctgccccacacccgctccacacccgcttcacacccgctccacacccgccccacacctccacacccacaccacacccgccccacacctgctccacacccacaccacacccaccccacacctgcctcacagctgctccacacctgctccatgggcatttttcaccctatcagctctgctggcttttcttattgatcaccagatatgagagagacaaggtgtcacaattctcacccagaccagaggacaatctgcttctgctcaaaggatttgggggtgaatgtagggagagtgagcatttttattttattattttatttcatctcaaaaagcgtgttgacttttcccaagtgctgacacaacttggacttaytcataaaagaaaatcagaatcgcccttgtgggaaacacagcagccctgtctgagcgccactgaggtgactcccggatgctgtgcggtgcagttctgaagcttctgttgatctcttatgaggttcagtttacggggaagggaaggccctattttccagcttccagggggtctgcctccaggtccaggctgtttccagaaaagatgaacaagcagggtgccagggaacagcttcatctgacccctttggaactgcgggtacagacatcacaaaccccagctgcctgccctggtttcagtgctggtgtttgctatcagctccaagcacatataattgcattagcagcttagcatctcaatgggttctccacgccctggcctttttctgttcctgtctgttacatgaaaggctcataacagagagggagcagcaagaagccacaggctgcttttaatctcttacgggcaggaacagggcataacagtaattactgtaatcattgcatttcctttaggatatttagggaagtccaatcctacagcttgaagtaaaatccagcatagaattattttgaatttttaattatttatattgccaaaatagcatgcttatacaaacaaaacaaaaccaaaaaaaaaaaaacagtcccggccgggtgtagtggttcacacctgtaattccagcactttgggaggcaaggagggaagatcacttgagttcaggagttcaagaccagcctgaccaacatgatgaaactctgactctactaaaaatacaaaaattagccgggcatggtggcagaaacctgtaatcccagctacaagggaggctaaggcaggagaattgcttgaatctgggaggcggaggttgcagtgagccaagatagtgccactgcactccaccctgggcggcagagcgagactctgtctcaaaaaaarcaaacaaacaaacaaaaaaaacagtcccctaaacaatgaagaataaaaaaaaaagaaaaaaaaaggccccctgccattctccatcccaatcccatcccctagagaagagaaagatagaaatttaagtattcttctagaaatgttatgttcatatacaagcatatatagtctaccctttaaaagtaaagcataaatgagattgtgccaktgcccttgggtaaaatgaacaatctgatcaaatattttcctctctgggagaagaagctatcggtagagacatagacaacagggaacagattttcaaacccaaatttccttccctcaccaggactcactcagaggagccaaattaacaaagaaagtagaaggctgtctgccagggaccagggagaggggaggggagggagttagtgtttaagggatccagaatttcagtgggggaagaggaaaaagttctggagatggatggcagtgctggttgcacaatgaatgtactaaaaccacagaactgcacactgaaaaatggttcaaatggtccattttatgttctatatatatatatatccacaatgaaataataaacaggtgagcagataaataactaaataaacccagcctcaccaggaccaattctgatgttccaatattccagaattatcatggcatttgatggacggtttgagcctgtcctcattagatgttctcatgtcctgtgttaaggacttaagactcagaagatttttcatggattccaggcacgtgggagtggtacagacaggagcaggagtgggagcccgtgtacgggattcattagggaaacagaactttgctacgttgggagggtatctcgaggacaagccttgacagagggtgtgaccagcgtctcctcccaacccccgtgttacctgggataggaaatggcctgaagtctggaaggtaggaggcaggaagtggggcttggttttcttgctgtgagccagatctgttggagtgggataatgctgaagtcagagagagacttctcaatcgaaccctatagtcacaaaagtagttgggaagggggtgggctgagaggtgcagggaggtgataaagagaagctggggctgtaattctgccctcgtcctaaaaggctctatctcatcctttaaaatcccaaatcacctgtaaccagaactttttttttttttgttttgagacggagtctcgctctgtcgctcaggtgtacagtggtgcgatctcagctcactgcaacctcctcctcccgggttcaagcgattctcgtgcctcagcctcctgagtagcagggactacaggcgcacgacaccatgcytggctaatttgggtatttttagtagagacggggtttcaccatgttggccaggctggtctccagctcctgacctcaggtgatccacacacctctgcctcccaaagtgctgggattacaggcatgagccaccacacacccggccatgaccagaactcttgagagcgtgtgctcaacactcgaagtccaaaagtctacccaagttcaggaagagagcggttcttcacctctccacctcgaattttgtttctagaatgttgcatgtaggtctgaagagtgacagcacgtttgtttaacaggaactcaaagccagcagatcaggaaaggacacttataaggtttggagtttgggttacagaggtttaaggtaggtcttttgtggcaaggaatatttgaaattgggcaagatgagtgagctgagatcgcgccactgcactccagcctgggcaacagagcgagactccatctcaaaaaaaaaaaaaaagaaattggggcaagatgtatgacataacaatttaggaatgagtgaatacaggtaggtgagttgaagggagttctgacaggtaagactgttgtctggcaagtgaactgtttgctcacgcaagcaaaccattgtcctgataggaaagtggtttgctcagacaaattagtttgcattaatttcctgaagccaacagtgaagctgtttcttsgttcagaggtttatcttcctcggcaagaattttctggagcagagaggaagtcactgacacaggtggtctcgatgctcactccaagagttgagttgtgtggctccaggtagactcatttcccagggtcacctgctgggccataatcaacaaggtacaagcttaagagagccatgccgggatttcaagttgcaaggaagagagattcaatggtgctttcttgagtcacgggtgttggttgtaagaaactggtggggtaaggaagctagaactctcccaggaaccaggaacggctctcactggcaggcctcacggaggagacccaagctgggggactggaaggtggttcagattgttcacaagctgcagtggctccagcagtcagattggggtgtgatctcacagcaccaggagccctgaacaccagcctgaggctcagccctgaaggcagcttgaccaggcaaacctggagactgcatcaacaccagcagcctccaacacacctgacctgctcatggccttaatcccaaacccaggtcctaaactacctctcactgtgcatcgcaagtcactgcccatcttcctggcttctgatctgctgccgtccccgattcatggcctcacttcacccactgattgcccttgactttgagctacaggtttcaccagctaactgcgactctagcctcagctctggggccatacagcctcaagcacctgggtcttgctccagctccagctccctgttctaggcagcccatccttgggaagaagcagacaaaactgcatgtcagagacatggctctggttgtcatgagaagactggattgcaaagaggtcaatgagagacgagaatctaaactaaggagatggcagtaaaactggagagatggcaccatacgaaagaccagtgatgaatctgcagacggggagagacgagtacaggatggcttctggtttccggctttctcaagcctgtgtgggaaacagaaggaggagaagattctgatgacctgctgctgctcaggccgacttcgaggattctgtggaccgcccagggaagaggccgggtctgtgggtagaaattggaacctggggttcaggctggggctgaggtaggaggcttaggagataatggaagttgaatctgggagggcagacgaaatccctgggaagtgccaggatttaagaggctggtggatgcagaagagcctgccaatgagggagaaatcaaggaaagaaatgtgtgtgtgcatgtgtgtgtgtgtctgagagagagagacagacacacacacagagaatggtaaagatgatggacacaggccaggtgcagtggctcatgcctgtaatcccagcactttgggaggccgaggcaggggatcacttgaggtcaggagttcgagaccagcctgaccaacatggtgaaaccaccccccgtctctactaaaaacacaaaaattagccaggcctgttgacacacacctgtagtctgagctactcaggaggctgaggcaggagaattgcttgaacctggaaggcagaggttgcagtgagcagagattgtgccactccagcctgggtgacagagcaagaccctgtctcaaaaaaaaaaaaaaaaaaaagaagaagaagaaagaaggaggaggaggagaagaagaagaggaggaggaggatgcagcaaaaaacagcaggtgaatctgggtaaacgatacatgggtatctaatgtactattcttcaacttttctgtaagttcagaattatttcctaatgaaaattaaaacagaaaaacaaacaaaccaaagaaatgtgcaagaggaagacaatcaatgacatagacagaccaagtcagatgaagactgaggagtattcatcagatgtacccataaatattctttggggatcttggcatggggaccatccacaggagggaggggacagatgccaggcagcagggctagtcagtgaaatgggaggagagggagcgagagggtgagcaagggcaattttaagaggcttggctgtgaatgggaagataggataggctgtggcccaggaatgaccctccaggcccccactatgaaagcaatccttccaaagcagtttgcaccccgacatggggcacaagaggggccctttgtgcttgacaaatggatgcatgaagggatggatgagtacattttcatcaaggaccaagtgagcctagcctcggggctgcaggctcctgggcagtgagtggtaatggggtrggggcttggtcaccctgggaagggggctgagcagggggtcctctgtccccagcctcattccacacaccatgctgcctgcccctgatccccttcacactcagactctgcctgcccagcacgccccaagctctgctcctcatctcttctctgtatccacccccgacctggtgtttccctcagattcacacgggaggcagctsaggactgcgaggtgctggggcagygcatccccrcaggcrctgtgctagagatggcygtgggtgccctgcaccatgaccctgagcactggccaagcccggagamcttcaaccctgaaaggtgagtactgccccttttaaaaagctctgaagggatgtgagtgtgtgggatagaaatttaccagtggaggcagcagccgggaggcacagacttagcaaaattgtccccaaatagtcaaaagttatggcaattcagatagatgtttgcaagacataatttccaaaggaaataattataccattttttagccacgcgtggtggctcaygcctgtaatcccagcactttgggaggccaaggtgggcrgatcacaaggtcaggagatsgagaccaycctggctaacacggtgaaaccccrtctctactaaaaatacaaaaacttagctgggcgtggtggcgggcacctgtagtcccagctacttgggaggctgaggcaggagaatggcgtgaacccaggaggcggagcttgcagtgagccgagatggtgccactacactccagcctgggtgacagagcaagactctgtctaaaaaaaaataaataaattaaataaaaataaataaataaataaataattataccattttttcaaggtccaaactgaatccagagatttagcatttcagcagccctgcatgcaaggaacaaggcaatttcaaatgattgtcttccattcattcaagccaggacatgggatacaggattgtatttcaggtctgcactggaaagtaacggaacatcatttcctttttaaaaaacgggcatctatgccaaaacaacagcttcagctgatgtctccatgaatctaaattcacgtgatccactggttgacctgggtccccgccttccaccacctggctttggttcattgtctcctttcatttctgggctctgtgattggaaacatctgagcaggcggcccacactctggtcctcatcagaaccagtcaatatcctgtgtgtgtgatctggcaagggaagggctggcccggcaccagttgtgttttcacctttcatggctccaactgagttcagcccaagcctacgacccagtcactgggaaaacgtgagcaatgggatctacacaacaatattccacagtcagcagctcctgaacgtgccgcagccacagggcttacagcctcacaataaagcccaggggtagtaaaaagtgagctcgctgttacagaacagtgagtgccacctagcttcactgtcatgggacacacgctgcaggcaaatgcactacttggtaggagattcagcagttctgaggaagggcctccagctctccaggtactgcagcttccagtggttcaagtgtccagtgcaggggcctgcaaagcaaacacgggcaggagaggggctgccagtgtggcccaagagacctgcagggcaagccagcaggacacgccccccagggagggcccaggaggtgctgaggtgcccggtaccctgccaaggaagcaggtggcggctgggtcatcctatgggaggggaggtggcgccatgggcccaggtgagggtgatcaccaaaccctggggttcagggatgccgtgtttagactctgattgtgggyggcggtgagtctgtgggcttaytagccacacactgaattcctaaggagaggcagggagggagctgtggacattccaggtgattctgcgaattcagctctgcctctggggctgtgcaggaagacaggaggccaggagcagagagggactgaggctcaggaatgagcagccatcagctcccagagccttggagacatccttgtctcagatgcaggggtggctcagctggagcacagggctgcagaggggagggagcgggtgttctgggccagccctgaccacacggacctgcaggttcacggctgaggccmggcagcagcaccggcccttcacgtacctgcccttcggggccggcccacggagctgcctcggggtgcgtctagggctgcttgaggtcaagttgacactgctccacgtgctgcacaagttccggttccaagcctgccctgagacccaggtgaggcccccctgctcagaggcagrggcaggggcaggggygggagggccaccccagttctctgcgtgagagcaggccagcctgggggcaacatcaggctctgcctccgtgagcttgggcaagctccttaacctctctcggcctcagtttcttgattcgtaaagtgggggtgataataataacaccctctacctctcaacatcctgtgaggatccagtgagttcacacagcgctcaggtaagccctggcaagccaacccgagcacgtgttaaccattgttattagtattgttctctgcacaccagggctggacctcaccttgctgtagctcttcccacttccacaaagggcacacagacaatggcatttgcagttgtgacatgtgcctgcctttgcggggtggggggtgcatggcttgtcctacagaaggtggggacacttcctctggctcctcctgacagagcaaggtgctgtctgcttggaggggaagctgaagggtttcagctccttgaasggtacccccagctttgccttccccccttgtgcagacactcacgtgtccccatggccacagcctggtccctctcacaggtggtgacacagcctcttcccaacaacatatgccttcattcctgaggtcctagactggtgcacagaccctgtcctcacccagagagctgagctctcctgaaatggggcctcacccacttttccagccctatctcccccccacatcacacactccagaaccagcagaccaattcctcaacaggtcagggagcttatatcccctgctttcacactcacagcaaccctgcagagtaggagtgactattcccattctttagatgaggaatcaaagctcagagaggttaaataacttgcctaaggccacacagcaggactgcaggcttcgtgatggcagggacccagtctgtcatattcattgttggactttccagcatctagcttaatgccaggcgcatgacaggtgctcactcattcattcaacaaacattaatgagcaaatggataagcagccagagatgagagaaacgggggtcctcacccakatcctgcccactcccaagctctccctccttcctgacatctggctacgtctctgcacagcrttagctattccctgcctatcctgaccactgctgtcccctgcacctatcctcatgcttgtcctgccacccggaacccactgttcagctgcagacctggacaggcaggcataggaaggcataaggacacagttgacagatagcaacaattctagattgagacaggcagtgcctctgacagagaacctgggaccagctgctggtcctggaggaataatgagcttggatgggggacatagagtctgagatactgaaagtgaacgcatccacatactctgggctggagacagggaggggcagatcggcagagcagagccaaaccaagtgaggtcaaggggcagacggaggagcagccccactgcatcggggcttccacgtgtgcggggcttgtctcacttccccacgatctcaacatacagtrcagcagccagaccagtctcccaaaacgctgcttatgcctggcactccccggcttaagaaccagccaggagtcaagggctccccgttcttccttgtctgctcagacaagtgctggggcctgcagctttttcagatgcctttgagggctatggctcccacaggagacacgtacagccccaagcactaagaccctggtgactctttgctgtcacattagccactggctcatcattttactcagctccagaggaaaccsaactcctcgagtaattctttggtttttcttcaaagtccccagtccaccactggctctgccttttaagctggacataggaaagctttctggatgtcagtgaggccagaccacagcacacatgagcaggaacagcatgaagctgctttccccagagcccctgggccagagggcattgctcagttactggccagaactggagagtgagatggggaggatcagcagggacggctggagtcactgaaagataggtttggggctttgctctctgctttcttcttgtgtgaccttggacaacggacttggccttcttgaacctccaagtcttcatttgtacagtgagatgctactatctctttgacaaatattttaattttctctattttaggtaccgctgcagctagaatccaaatctgccctaggtccaaaaaatggtgtctatatcaagatcgtatcccgctgacacagaaggctgccgggtsgggggagggcacccccaaattcaaagaaaaccctaagtgtggatgttcagaattttggaaaaatgtcactgaagtgattgaaagagtgcctggcatgcaaggrtaagaggttctttacataacatttcctaaatgcttaataaacrtttgttgcacttggttttgacattgccaatggggtttgaaccagtgctctctctaaatgaagaattgctgataaataagtgaaaatgtagttttgacaaaacaactgagaatgtggggttttaaaggaagtcccaggcttgtgctgaaaggaatccatggtgcagggcacatgaggacccccaggtaagcctgtcctgatggcactagctcgtggctctttcagcttctcgtgcattgtggagttgtagagaatgacatttatcgaaagttcaacctcagcagtggttccaaagctttattatgctttgattttcctaggtagggtagtaccaactttacagtcaagtttcaatcgacagaaaaatgagagtctgaaaaatgatatactttttcttttaaagaacactgtatcggccgggcacggtggctcacacctgtaatcccagcactttgggaggctgaggcaggtggattgcctgaggtcaggagttcaagaccagtctggccaacatggtgaaaccccatatctattaaaaatacaaaaaaattagccaggctgtggtggcgggcacctgcaatcccaggtacttgggaggctgaggcaggggaattgcttgaaccagcgaggtggaggttgcagtgagccaagatcgcgccactgcacgccagcctgggtgacagagtgagactccatctcaaaaaaaacaaaaacaaaacaaaaaacactgtatattaattttgatcaaagaatcaaaatatagaggtgattttttttgtaaaaataagtattgtgttgctaagcagttcacattcaaccaagcacttgcaaggtcagtctcacgatcagccaccagcagctgcgcattcatggctgctggtgaagagccgtatcacctccctgtgcctcagagacctcttctgtaaaataaggaggctggcctcgatcaaaagaccacttgtcctctagttgacacctgagcagctttaagaggttgaatgttgtatagagaacgatcttgtagaaatctgtaagccccttatgtgacacccagatgctgacgacccacctttagaaacttcaggccattttgggagagttggcagaatgagtttccacatattcactgctgggactgctgcttccactgtttggtggtcccccatccccttcagccaggagcacccactgtatccctcaaaatcccccttggggggccccttctcttattctctggccctccaggcaggaagaggacaccccagctgcccagcactgggccaggcctgtgagtgactgctgcctcaaggtgtagggctgtcctgtggccctccccacacccttgttgccaccacctgcccttctccatcacctggcccctctgcaatgcccagcctgggactcagactcactggagaaaaccatccacccctgggaacctgtcggcctccctgcctgtcccacaatccctgacctccccacggctgccgccaccatagaacctcagcctgcagacaggcccaatggcgcactcagctccctgcttggagcacagccccacaacctgagtcctcccttgggacctccggccccgccccccggcctgtcagctccatccagcttccctcgccttcccagctcagttggtcaccaccttcagacacagtggtagaggcttcctcatgtgctggggtcactggactccagtccttctactgtgtgaggccaccaaccccacctctgcttaaatcccactgttcacatccaacaccaggtatcacagggcagggaaccgcaccgcctggtcctccaaaaaaccctcttgctagattcccaactgagtcctcacaaagattctggccaatcccacacacatacacccatgtcccagaccctaccacctcttggcaccaaacatcttgagagtcacagtcatttccaccccttcccatcacaatgcccaccctttctgcaccggcaggaacggctccctccccgtcatcaagcaatctggccatgtggctcccaccctccctagcattgctggtccaaggagttgctcttcctaacctgctttcttccaggtcacccagccatggctgccagagtcttcacagctcagtggacttttccggagcaactgagcatctcccaccggatccctctggccgccctccccatctacacccccagtgaaccagttctgctccccaaatctccccagctcccagatgattcagaagcatagaatcagttcacttacatgcaagaccttagcaacagacatgcatctgatttaatggttttctctgacacctctttgcccctgcccaactacaccatagcaggaccaatgacttaatgaaaaagcaatgagtgaaatggcaggatcagtcaggctgtgaggaaatttggagggggttctgaaaatcataccatgggcaaccatgtggctgacccagctgcwgggtgaagctgtgttgttcttgctgttcctctggtcatttaccttggctctcctccagcttgactgcacttgcctgtgttaaggtttcagatcactccaaagatggaaaaatgggttcatattcaccttggacctgagaaatacaggcaagccaactgaagcccaagcagcaagtcgccagcagacacacgtcctcaggaaggtggaggctgggcaaaaagcatgtagtgaggaccgagtagggagggctgacagcctggtgacaccagtggccccgccagcccctctgccaacagggccagaaccagccaaagcccagaagggaggctcctgtaaactgccacgtgtgagggacacacacaacactctctccacatgcacagcacattgctcagtggtgaacctgggtcttacggggcctgaaacttatctacgaattggaggaaagagaaaaaaaaagtgtaacatttgcaaattttatcaaaacctatgaccatgtgaccatattgctagggtccctcctagggcctggggaggggctccagcaagtgaggggccctgaaccttcagcttcactgtcttcttaataaatccatacgtagctcaccaagccgtgtcatcagctctgtcacagccctgataacggtctgaatgttacgacccccaaaattccaatgttgaaatcctcacccctgaggtgatagtatttaaagtagaggtgattagaccaccagggcggagccctcatgaatgagattcagtgcctttataaaagaggcccttccaccgcgtagggttacagtgagaagactgaatctatgaggaagcaggaggttgcactttatagactccaaacccggtaaataaacrtctgctgttgatgagccgtccagtcaatggtgttttgttacagaagtccaaatgaacaaaggcaatccctgactctcagaaaaacgcctggcactcagtaggtgctcaatcaatagacgcagaaaaatgagcttcagtcttcatccacttcggataaattttcttttatttccatactcttttgtgacatgtgtgrcacaagtattcaatctcacagggatgttaaaacccacactcgaagggtktccagtgtgcttaggaaatgtgggtttgcgcaatcacaggccaagcctgggggtcctcggggaagctactcctccaggtcacctgccaggtggatgcacttccttgggcaatgggtgaccctcccaggacaaggggaaccagcagggactcgatggcaccacacagcagccacctgttctgacaatgtgacacagaccaactaatgccagagcccaggagaagccacagcagagctgcctgggttggtgtcagagcaacaggcagaagtgactgtgccgcccgtgggctgtcatccaccggtggctactgtgtcattctggaaaaactatgatgccatgagactctgagaaaccgaatcactgcagagacaaactcataaaaattaaaaccaatccataaaattgtatctagaaactctgtccctggtgccaataagcagcaaagtcaacaaagagtaaaaactaaaacttcaacacattattaaaaagcaaaactggactcaactacaatcacttctggttagtccactagtgaacccaaaagtgacttaaaagtaaaaatcattattagcaagagattaagaacataacttcattgagagrtcaatgttaagagaacagttcattaraagtttctgtttaaaaagaaaaggaaaggcccaaatagccatttcaaggcagagcaggtgaaaggcctggaacactcctgtgcgctcactgtcggctgctgaacagggagcccaaggccagcaggatggagggtgtgaccgagggcttggaggaggtggtgtactggatgacatactctgggtagacctggtgtttctcaaagatcacaaagatggaggggtcggacacactgttcacgcagctatcatagaaggcgttgctccagccctccttggccggbggacggacaaaggaggcattgcccctgacgaactcgcccaccagcacccggrccaggaacatcgtgtgggtctgcgtgtcggatttgctgtagtggtgggaatatgcagcatctcgggcaaagtagctccctgaaatgacacacgagggctcagctggtggaggggcctgcagccaggaagggtcagcacactgcgaatagcgtcctggtgatgtgcaacgccagggcctctactcttccaccccgcatctccctccctccctctgtgccatgtctccactctccctcatgaagtcacatgcatcagtgataccaacacccttctgagtggcagcatctgaggagttaccaaactgagatagcaaattcctttcaagttccggatctgccccacgaaacctaaaggcctgtggacacgtcactacttaatcccccaaacctcagattcctcaggcataaaatggggctgttcagcccaaccttacagggttggcatggaaaatgaatgagatcccatatacggaagcagtctgtagactctggcagcccaatgtatagaattatgagccttgtcaaatggaaatctgagttagaagctgtcacctgtacatttaaatccacaagtctaccactggctgctgtccatcttgaccccttgccatcgctgcctcagacggaaactgactaacaaagaactgatggacccggaacatggactgctgggcagaaaatgttctcaacttggtaagcatattgtggttacagaagataatgtcctgttcttgggatgtgttaaagggtgaaaggagacaatatatgccacctacctgaaaatggtgcagaaagagagagggagagagaaagagagaagtggcagcatgttaaaaccaatgaacgcaggtaaaatttacccaaagaggttttttttaattattattattccaattttcttgaatttcgatttccaaagaaatagtattttaaaattttctttggcaagtttaaaaataacagacaagaaaacactcagataactcacgtgatagctagaatacatgtttacatgagtatctctgagggtttctggtttctattctaaggaaatcaatagtaaaggcacagtcagggacttcatcagggctgggaaggtatcccctctcctctcccgtctctgtcaccatctcccagggcctctgctccacagggaagcaacaccccagcctaggcaggccaccctgcccacacctggggccaagctcctgaccatgcccagaggagcaagagcaaggatgtgactggtagctgtgcccaggtaccaccacacatggagtctgaacctgctcatcagctcaggctggtcccctcatgccctctagcagtctgttcctatgcaggggcaaagcaacatgggttttgctggtggaggccagtcatgccttacccttgccgtaggaagtgccatgaacaccacagacccgccagtcaaagttctgctggcagatggcgtccacaaaaatggcgctggtgccgtggaacagctgccgctcgtccacggccttccctccgttctgctt

SEQ ID NO: 8685 - DNA, 37357 bp, Homo sapiens
gctcttcagcctgcagctggctgaaaatttatggatgtccctgagaggggtggtcaggaggcctggctggctgacgggagctgcctagctgtttacccagtgccgaggaatttgagggcagcaacagcccagtcgctttggagggggtccagcctctgggtgcagctgcttggagtaacctgcctggtgccggggcctggctgagaggggccaggcctcagagagcatggatttggacacctctttgatgttatagacaggaaaacagaagttggagtggggaagtggccattccaaagccccacagcaattctgtgctccagtcaagaccagaaaccaggctaggaaggcagcaggaggaagtgatggagagctgtcacttgctgagatgctcttgttcatgtgtgtccttgttcaccgcctcctctactagaatgtttgctccatgagaccagggaccttgtctgccttgttcactgctatgtcctgagcacacaaaacaaggctcttgttgaagggatgaagtcagaaggcctggggaggtttttttccctcacattacaagatgtacagagaaaggaggttcagggctggtgcagaggcttcatgatggcatcagggatcccggctcttcctctctttccgctctgcattagggtatcgtttttgttctcatggtccccaaatggcttctgtgcctccaggcattgcacctgcatttacagaaggtagaagggagttaggacaatgggtagaagacatgtgcttatgaagtctgtccctttcaaatcaagaaagttgcagctttcctagaagtgactaaatcgcacaccatgtgtagtagttctctaccttgcttcttcttcttcttcttcttttttaggtatctaaagcctggccccagatttggtcctcagtggggcctatcacttttgttgtttgctagtggttgttgtttcattttttaaaataaaaatcccctagctgggggaatgacctaatgaggtaactcctactgtggtgttgatggcagttgtgctattttgccaccaacttcttaaggtgcctggatctctgaggtttttcctgaggatgaggtcagcagcagggaggagggggctctggcagaggctggtgcttaggagggaattacctagtccttgcagcagcacactggatgcgctatgacaatccccactctacagctcagagtgaggcagaggctggttggagaccagggccaggagggagccgggttttccagctccccatggatagtacggctgcacccatgatctaaaatgctccgtcctggggtgtgcccagagctgttattcagcaggaggctgctggctcggctatgcagactttgcagccagtgctccttctgcctgctggtcccatctccctggagccttcagcctgcagtgcctgtggcagcagcagactaggatatggtgtcattgtgcccctgggtgcagccagggacccctggactgcctggctgaggggaggcctccttggagtgtctggcagaccgttggggtcccctgcctgcccactggactcagcagctggtcattggaaggtctggttgtccccaggccacaggcctgtgggctgtccttgccaggctgaccctccaggctgacttcaaggcctgggccccttccacaggcaggggagtaggggagggaccctgtgggttgcacgtgtaggccctgacccctggtgaccgtgctgggttcggggcaggagacaggagagaatgctctgccgtttctcacatttttcaggcctttggctttggccctacacattccagccccaaacctcaaaggcagaagtgaggtggggcttgcagccagaagggaatcacaggccagtggtctggcaggaagctgaccttcagcctgggtgagctgcagggggcacccaggagcccctcgggagaagacagccctggagctaccttggctgccaccactcacatgccgcccacgaagctgtccccaaggaggacctgtgtcctggctctgctcctgaccagctgtgtgtcttgcagcagatcactggccccttgggtctacgggagctgatcagtgcctctctgctgccttcctctgctggctagggctgggggaggctcagctgagaaagggtttaaaggacaggaagaatcatagtgacaatcgtgatcaaaatgcttcccactgtgcagtccttaccgtgacccagccccttctaagtgcttcatctaggttaatggaaaggacacaagactcccaaactctttgtttaaatacaaaagctggcagagtcgtgggttttatttttacctccaggcctatgggtgaagagggaagttccagtgatgttcttctgacttaacaaagaaagcttacaactaattctgcctttgaggaaacagagctgtctgtttaaatattcatataccatggcagcaaattattaagccagataaccagccagaattacagaccttttcaggattaaagatgactctctaggatctgggaaccatgtctgaagtcagggggtcttagaagattcctttgtcagaaataacattgacaagggcagtttgacaagcagatttgtatctgctctgccgtggctgcggtggcatggaacatttccttgtccttatcttgatgaattcagagggtctgaagttttcaagggttctaccactccacaaagaaggtatgaaaagcaacttgaagaagctcaaaacttatcattcgtaacggaaaacagcagaatataaatagtgagcttatgtggtgttgccacctgcatgtacagacaacgagatgggcattatcattatccccgcttggcgcaggaggaagcggaggctcagggaagttcacgacttggctggggtcacacagcaaggaagtaagggctgcacttgtgcagatggggactgtggtctcggtggagtgtgttgggctccagcgacggggccccaggctcagctgttgcttccactgagcagctgtatttgttccctgcggccgctataataaaagaccagaaacacagtgactacaacagacatttattgtcttacagttctggaggccagaagtcaggaatgcgcctcgctgagctaaaatgaaagtgattccctttcgagcctctagaggagaagccatttccttgccttttccagtttctggatgccgcctgcactccttggctcatggttcttcctccaactgcagagccaggagtgtggcatcttccactccctctctgactctgatcttccttcacttatggggacccatttgatgacctcagggccatccagataatgcaggataatctccccacccacctcaagatcctgaatttcatggcgcctgtgaagtttctttgccatgtaaggccatgtacgcacaggttccagagattagggtggattttttttggggggtgagaggcactattctgcctatcacagtggctttggccaaagggtctgacctttgggataatagccgtcctctccacagggggtttgttgggaatgacaataaagtgattcaggcttgtactccacagggagtgactgaggtgcctgccaaggggccagtgtgtgctggagcctggtgacccggtgagagacaaatgactgcatcagaactcctgcttctgcgagggaggtagtgcccgaggggactcagaatcagacagatcaggggttcaatcccagctctgcctcctcctagcagcctgagtacgggtgagatcggggagcagggacgggctggaagggagaaaacaaacagatgcattcacgtgacctcatttcaccttcaccgcagccctgccaggcaaatttctgttccccccaaccgccccgccgttttgcagaggtgaaaacaacagctcagagagatcaagtgccttgtctgacaccacacagctactaagtggggagctgggattccccatgccccaggattcccaaacggatgccacctactccacctccagggctgtctgccacatctgcgtcctcctaggctgtggcttccttaatatgttctttaaattgacttactgccttttttatttaaatgcatttcttttaaaatgagactttatattactcctataaatggaaaatcacaggattcatggactagttatgtatatttttataatgcacattaaaatgaatttatcaccataaaaaatgagaaatgtttacccatagaccatgtacaattattccacatgctgtcagtgtgtttcatccctctctttgggagttggctttgcacctgtcctggtttcaccaaatcacaatgttatgaatggctatcatttattatggtaggaaatcgtcaaatggcttctgtgcacaatcaaatgcagactccccagcatggcctcagggccctcctggcccctggtttcctgatctccagttcctctggtcttgctactcttagacaaaggaggacttctcttggttttctgcctacccagccagaagatcccaggccatgggcctgtggagccaaagttcttaaccactgcactgtgtcamctttctatgatgtcaggcctcagcaaggcttatgaaggaacaggaacagccttgaaaatgaagttgggaagggataggccaggcctcccaggagcccaaagcttgcagagtccccttggtctcattggcacatggagaatggattgatcaagtccaccaatcaagttttgtgggtctaacagagcaactcctgccaagtgggaggagcttagggactttctataacctctcctggggcagaaatgatgggctgcagcagtgtccaatcctaactccatgatctcctgggagggcagggcttcatggcagttcctgtctgctctgcactagaagcttggcattgcaaaggggctcagctgtggaatgaagcagggcttcttccagaaatgttgcatgtacttcctattccctttctttattgcaatatggataatttatcatctgaggagggagtagagattccagggtagcttgcctaagagttgtggcttattaattccaactttttgcaagatcaagggggaaaagcaatccctgattttgtgtgagtatggggattgggtcttgaggccctgaaagtgaggttcgggtctcacagattgctgtgaagagttattgacccacctagaagagaagcctagcccagggcctggcgcacagttgatgggtttgcttcctggttattcttccgtccttgtctggagccctgcacgcctcttcgtagcttaggaagaacaagcttttccctgcggctcagggtgaggaagtgggagagaacaccagctccagggaggcttctagcaccagtcagcctcagttaacatccttgcaccttcattgactagctgtgtgaccttgcacgaatcattccccctctctgtgcctcagtttcttcatctgtaaaatggggatcataatagtacctctctcaaaggattgaggtgaggatgaaaggagtgaatccaggagcatgcctggaagaggcaggaaatgcctcctagacaatagctatttttgcagccagacagatctgggtttgaattctgccaccagtgctaactactgtgtgatttggggcaagtgccttgacctctctggacagctgtttcctcatctggaaatgggcttggtaacagtcctggcttccaaagttggtagtgttcttctagtaagcaagctgtgtgaaacggtggaaccctggccctggtgcagagaagggcatgatgaccgtgttagggtctgtcctctctggaaccccctcctgggaatggcagagggcagtggggtgctctgaggcaggctgctgccctgtccccactccccctccccagctgccccgccccagctgtgacgaccttgtccctgcctgtctaaggggcaggaaggaagtgaggagggcagccagcarcttccccttctctgccctgctccaggcaccaggctctttccccttcagtgtctcagaggaggggacggcagcaccatggacccccgcttgtccactgtccgccagacctgctgctgcttcaatgtccgcatcgcaaccaccgccctggccatctaccatgtggtgagtgtgcgggccccgggtgtgtgtgcgtgcgtgcttgtgtgagtgtgaatgtctgcggtgacccgtcatctacggagccccacaaatgaaagaactcctgctctccacctctctgggggaccctgggcaaatccctgtcctgctctgggcctcagtttccttctctgtcaaatggctgggggtaccctggggagatgccgcaagagtgaggagtaagggagctggaatccactttccaggcaaatgtaactgacgttcactccgaggctggctccgtttctgcctctgtgagatggggcacagcagcrgccggaaggttatttgtgtgcaaagccaacagcagatgtgaaagtgctttggaaggcagggatcttggraggaacgtgggctgggattgtttgacygggatgtgaggtcggccgcagacacagccccgattcttcccctggggcctggagggagcctgggccactcgaggggatgagaagtgggratstcccctttgtgcctccagtggggaggcaggggccgtgtcctctcagcttccagctcagtcaaaccacggccttctgcccaccaaagagaacttgagacctgtgctaatcattagggtaacttgyccggcccaagctcttgttgggcaacttgtgaagtcacggctgtcactggttcctcctttcctggtgactcacagtgtggtcttgggcaagtcacagtgcccgggggccaaggctgcccctctgcctggggtggctgagggtcagtgtccttgtactgtcctgcctagacccaccctactcccaaactcctggccacactcatctcccctagacccaagcgacttcctcctggggtgactcagggcctgtggttaacagttttctcatgagtctggaagggcttcctcaaaattagcctagatccacatgctgcggtgggttgctgcaaactcagacctgcctgcgtctgcttcctgtcacaggcagggcaggcagagctgtggcaagagcccagccttcaggggggcgatgctgttcagtggttagcccacggcctctggatgcagactcctgcatgcaaatcctggcttccctgcttcccagctctgcagccttgggcaatttacttaacctctctgagcctcagttttctcatttaaaaaaatggggatgtgaattatcatacccatctgatagggtttgttgtgaggctcagggagttgatacatacaaagcatgcagaaccacgcctgacgcacaggtgagtgctttattattcgttgtgcatcagacatggcacctgctgtcagcatccttggagtcaagttgtcagattcaaggactctagttttgggaggaggaactcagaggttgtccttccgagctcctgccaatgcaagagctgagagaagcaaatcactctttgagygtccctgtaccctgtattttaggccttcaagctctgagactatgcacattcttagaaggacagtgtggcatgcaggggcgcctcacaggtagcaagtccctgggtcctcaccccagccctgccactaactggctgtatgggctcagacaagcctctctctgggcctcagtttcccttttataaagtcaggggtaaggtgatgttgactggctcagaggtctccaactctgatgcctctagggtctgggcaggccatgtgagtgacagcagggggcagatggggcctgcggtgacccmgggagcccttgcttggcccaccctgcagctgttctctgtttttgcttgttgttgccacgaaggattgtgggccctggtggccgctcttctgatgtttagagaatagggagcaggcttttgtgtcacatcttctgatgtttcaatgctagtgattgatgcatggtagaaaaaaatctcagtgcaggccaagtcaaatccatttgcaggttgtgtgggcccagaggctgccctgcaaacccgggactgtggggctgttaaggtttcttgttgatcgtgccatccgatgtcctcacctgtaaatggtggtgtgatatacggtccctgctcacagagctgaagaatgtgtgggccctagcaatcatggaagacttcttggaggtggtgccattggcaggagggagagtttggttgtgggcagtatggaaggtgaggagaaacaggtgagcaatggcgtatgtgttcggcttctacagggacacaatagagacaaacctggagtttggggaggaggtgataaaggttttgagtgacaagctaagaagttggatcttctctgcagtgcaccattgatattttgggctggataattcttcatcttgggggagtgaattgtgcgttagaggaagttcagcagcatccatggtctctacctactagatactagcagcactgcccatctccctaccctgccacttgtgataaccaaaaatgtctctagttatggggcccaatctctcccagttgagaaccaatgcctatgagtgatgagacgttctagagcaggagcaagcaaaagagcagaggggtgtcctggaagctgtgcgctcggcccaggttgtctccaggctgtggtcctcagttgactccagtggggggttatcttcctgcaccccgaaagagtcctctctccttcccagaaagggcagggcctgggggctttcccataggctagctggcaacaggtgtgmtgataggaccttgagcatctggatggaaaaagagaagctgtggtccagatgtgtcaatagcccatgctggctgtcatctggacccagccatgggtgacgactctgcacatcatgagctatttgtggacttggcccctctagggagggttaaattgagaccttgccatcctgagacagtgccacgctctattgagtcatgagggcgttattacatgagggaagcctggtccgtagctttgggctcgggcatcttcctcaggatgtcagtgggtttgtgtagaggattctctgggtcacccaaacttgcacactttgggaacccagcaaactttctttctttttttaaaaaatctattctttttttcaaarttcagtaacttgcccatcttttgtggtttgatttgttttgttttgtttttgtttttaagagatggggtcttgctctgtcacccaggctggaatgcagtggtgccatcacagctcactgcagccttgaactcctgggttcaagagatcctcccacctcagcttcctgagtagctaggatcacaggcrcatgccaccatggccagctaattttaaatatttttttttgtagagacagggtcccactatgttgcccaggctggtctcaaacccttggcctcaagtgattctcctgccttggcctcccaacgcgctgggattacaggcatgagccaccgagcccagtctagagaaatttcttaaattgggtctcttgggtcctggctttttgtcaacctgaagcacgttctaagtcgmtggtagaaagtggacacccccagaagacacttttgcccagaaatctctttcttcctgacccctcttccccagagtgccyggaattccactgtcagaaatgcattgtctgggttaaaaaacttaacacctgctatgatttcaacagtgtcaaaacaggatacgtcaaaactgggcgaggaggaaatgtatttgggttctaggatagtgaaagctctattttttctacttttctgtattttccatatttggtacaatgagcacgtacttagaacggttttagatttacgaaaatattgcaaacacagtacagatagttcttgcgtcccccatgcctagttcctctaktgctaacgtctcaacgttagtgtggtgcgtttgttgcaatgggtgaatgaatattcgtgggctgttattaaagtcagtgcttcacccctatttccccagctttcctcttacatcctttttctgttccaagattgcatccaggatgccgcgttacatttagtcttcacacttccttaggttcctcttggtatgatggtttctcagatttttcttgtttttgataatcttgacagttcgaggagtatttgtcaggcattttgtcaaatgttcttcaactggggtctctggtggttttctcatgattagwctgggaatgtgcttttgggaggaagaccacagagrtgatgtgccagtctcagaacatcgtactaagaaaaggttctgccaacttgacttaccactgttgctggtgactttgagcccccggctgaggttactcctttgtaaagttactctttttttctcctttccatgctgtatgttttagaaggaagtcactatgctgctccaagcaactcaagtttgatgaatggggagttccgccccacctccttgagggcagagtagctacataaattacttggaatttctcaaggagatttgtctgtactcccagtttattatataaataaatgatttatttatattacagggacccagggatctttactgtatgctttgggttataatccaatggtactttactttgtggctcaagtatactacttttaaattggaaaaaaaaaaaaagtacggccaggtgcggtggctcatgcctgtaatcccagcattttgggaggttgaggcgggtggatcacttgaggtcaggacaaaaccctgtctttactaaaaatacaaaaaattagctgggcatgatggcgggagcctgtagtccaagctacgcgggaggctgaggcaggagaattgcttgaacctgggaggtggaggttgcagtgagccragatcgcgccactgcgctctagcctgacagagtgagactctttwaaaaaaaaaaaggtaaagcattcaaatcatagtatttgaagaaggagtctctattgccctgacctcgtgcaggtaagttcacccatgtgcccagccccaggccgggatacagccctgactcattcacggcctctgcccttgaggggccagtctgccaaggaaaaaccgacgaggacaatggatgacattgctggctatgatgggggcacagatgtagggctggaggttgggattctggaatagcttcttggaggaggtctgagtcttaaggatgagtagggctttgcttgggcaccttggaaaagaggtcacgctgggcggggggagtagcatgacacaggcttggaggggaaggaccctgcagtgcttcagagacctagcaggtttgtcaagctgggttaggaggggtggccacgaggtgtgtcggggaggagggtggagaggtccccaggggtgggacctgcccgagtcctttgcttttacaagcttcagagctaagaagatggatctctcttcggcctatcagctcattttgcagatgggaaaacaggtccagcagggccccttacttgctccaggacacatggagagatggggcaggagcttgcttcaggtccccctgctggcacacaggtgtgtggaatgatccagaaagtgggcaaatgagttccttccctgccccatggctggggtggtgtgtctgtctgggaggccctgccctcatccagcctcccaccattcatttcttctttatggtccagtttacgggaagcttcctcctccaggaagctctcctgatttgtcctccttagaactcctggggctcttttctctgctccactttgggggcagtgatttgtgattgaaaggaacacaggcccatctccattacttaccagcagtgtgacttgagcaggcgggcacctttgttatctgagccttgccttcctcatctgtaaatggggccagtggtccctgcctcaaaagtgatcatttggaggagaccctagcgaagccgggtggagggctagcaggtgagtgcctgaagtgggctgtggaagaagaacacaaggccccccgccccttttttttgagactgagtcttgctctatcacccaggctggagtgcagtggcgtgatcytggctcactgcaacctctgcctcccgggttcaagtgattcttgtgcctcagcctcccaagtagctggaatcacaggtgtgtgccatcatgcccggctaagttttgtatcgttaggagagatggggtttcaccatgttggccaggctggtcttgaactcctgacctcaagtgatccaccagcctcagcctcccaaagtgctgggattataggcgtgggccatagtgcctggccccactcctctgttgaaagttcatctgtttggggttgaaaaatgggtccaaactgccaggtggggaaaaccctgggtgagaatctgttagaacttgccacctttatgtccartgcccctgggctggacagagaggccacgttctctgccactgcagctctgtgcgcttcacggaggggtgaggaggccggtgggggcagggtgggagttgtagcccctcctcagtgtcagaactgagttgttctcctcacctcaggggtgtgaaccccagcttctaaaagcaggaggcccccatggcccatcccrcccagagagtggctgaagggcctagcctggcctggccgagacttctctgttgccaacctggccccgaggcctccaggaagtgaggcttttattttgagcctagagcatcagcctggaaccaggacttcgctctgagctcactgtgaggcgagcgttggtttcccaggggaccccaccctgccaagggaagtggcacaaagcaccccctaatgaggcaggaagcaaagccatgagctgcactgcctcagccctgcacaggggctgcttgggacaaggcacccgtcccccagcctcaatttcctccctggtcaagtgggattcagtaactaccatttgtggcacyggaaaaatggcagctgccacgggggcctccattttacagatgaggaaacaggctcaggagggcaagtgactctgcagcctgtgttagataaagaacccgagcccaggtgtctgctccaggtggaggcagggaaggcagccttcctggcagccatgggatgggggagggggtcagctctgccatccccagagccttgttctgagaagcacagagcccatgtgtaaagagctgatttcaattttacctgcaaaatcagaaaaatatgggactcatgttagaacctgtctctcaagactggcgcgaggwtgacacgagagagtgtatggtcagtcggccctccctatccgcaggttccacatcgtggattgcagattgaaaatactcagatgcagagcccgtgatacagagggccgactgtataagttcagaagaggacctggcgtctaataaatgcacaacaataatagtatcaatacttattatcactattgtgggtctttgctctgaagataaagggagaagtgatggttttagggaatcgtttggggagtggagggtgcttccccagatatctaggaagtggagaatgacagggccttgtgtcatacctggaggccaactctgagccccccactggctgctcctaaagggagatttgataagctaccaccagccagaatatctctgctgctgggattcactggtactgtttgcctttggggcaaagttagctgctagcgcccagtcacagcacttcctgtgctgcaggtgacaacctcctccagcgccatctgagccgtccgagtctaggttctctaggttttgcatgagccgtcacatctcctgcatgctctttcccctttctctctaaccccagaggccccacccctgccaaaccggtggatccgtgtgttcccccagccaactgctgccatttactgaggcctgctgcgtattcagcacatggatgacgccaaatcacagtttactaagaggaacgtcttgccgtttcctgaatgcgtctcatrcacactggcctctgctcatgccctttcctctgcctggaacactttttccattgctctttcggggaatcttcttcaagatccacctcctctgagaagccckccctgacccctacggttggaccctgagctctgggtgtkgacccagagccctgtgtgctgggtccctgggagtcgtgccctctggcctggatgctcgtttgggtcttgacccagcctgattcatcttcatgatcccgtggaacctggcacaggaggtgccagccaatctctatttgatttttgcaaaccttttcttgatgtataatttacctayagaaaagcacagctatcttaagtgcacaccttggtgggcttctacaaggtgaacacacccatgtgacctccacccaaactaagaaatcagaccagcacccagaggcccctagagcccccgcctcgccactgccccgcccccactgmcttctgcctgtctatgtagttctataatacatacatctgtagaattacgtagaaatgaaattctgcagcgcgtgttcttttgtgagcacttctttctcccaacgttatgtttgggagcttcgtctgtgtggttgcgggtagctaactcattttttccattgctgtgtatactccattgwatgaatctaccacaatgcatttgcctgttttcctgcaaaataacatttggattgattccagcttggggctgtyacaaataaggcagccatggccaccaggctccgtgctgggtgtccacacacaggcacctgtgctgctcagttgatctttctgaatcactgtcttcaatgatttacttctcacacccactccaggaggtggatggattcttctctcccttctacagatgaggaaatgttacagatgaagtaacatggccaggccaggatcccacaggggatcagcggctgcactggggttctcactgaggtctgtgagccccagagcccagtggagggaggaggggatgaggtggaggcggcgggtgaggacgagaactgcggaagagtgaagaggagagagaagccaggctctggggagctgcaggcagccaggccgggctgctgcggagtgcgtggccccaggaatgggggcrtctggtggtatctgggctggctggagaggtggttggggagatagtgctcttggggggctggcccccactgagccctcataagctctgaccagaagcacagggtggggaaggggagcttcctcttgatggtgacacatctgactcccttctcacatcctcctcccaggcaacccagggaaatcagggtgggcaggtgaggttgaggggactgagcttcagggaggggccataataataatgatgatggcagaagtgtgaggctgtaggacacagggtcagggtggagcagccctgagggggaggggcaagggagggctctggcacttgggacccatatggcaaactgcattgtctgttgggaagggttgaagacaagcccgggcctgtcttcttgtgcagcctctgtcctgggctcgcacatttggtaggaggagccaatgaagtaaacggataggaaagtgtccacactctggctggcacgggtgtgtgctcactgacggctgggtcctttctctataacctttacctccctgaaaatctcagatggtgggtctccgcctgcctgcttctgagacggtgggtcctgggcctcagggagtgagagagagtgggcctgctctcctgcagaagggactggtctttgaaccccagaatcgggggttcttgtgtcatcaccaccatccacatgatattccttatcaccatcctatcctgatgtccccattgccgtcacccccatcactgtcaccaacatcaccaacagcatctctgatcatcactgtcatcaccacgccaactccaacaacatcccaacagccactccccgcctcacatggtcaccatggccagtgcctcccaggtgacacctggtgcactgttttcaccgcatcccctctggtaccgccatccttattgcccagccatgttcaatactgaccccattgtccccatcttccctgatttccatcctccagcccctgcccccattcttttagctcaacctgttgcttgctcctcagagccaccaggaaaagaaacaaatccccctgcccctggccacttccccaactggccagcttggggaagctgtgtttgtcattaagaaagaaaggctgcgtgcagacgggaataagaactgaaaccaaagatgggcagaagaagaggtgaaaagcgggaaaggagagtgggggtgggaagggtggctgagcatggctgggaccgcagcytgagcctggcttggaggcaggaggacagagctgattttgaccctgcgacagttttggtgtgtgaccttgggctggtcgctgtctctctctgggccatatttccccgctggtaacatcctcctctcagggaagagacactcccgtgccttctgagtttccctgaagggactgaaacacacctgcaccaccaggcctgtggcttttgcacatgatgtctgctcttttggaatgctttcttctcttctgtgttggaaaactcctacttgcccctcaaagccacgctcatgggtttcctgttggtgaaattctccctaagttttttagacagcaatgcgctctccctcatcaaggaccccaagccccatgcgtgtcctctgtcatggctctgagcacaccattcatgtatcgagttccctggagactgtgacaccggcacgccagggtcagtggcttttctagacagagtttggaggcggtaggtgctcagagagtgtttactgagagtcagtgaatgcccagaggtagcaaaaaccaccacccaattgtgcttgtttatggtgcacctgctgtgtgyccggctccgcgcaccacacgattccatttgacctcagcaatcctgtgaggcaggtcagtgattatccccattcctcagatgaggagccgaggcccagagaggttagtggctggctcaagggtgcagagctcggctggggcctggggccatctgaccccagcacccgagctcttatcttcatgatctcaccagcatagaatgaagggacagtgggtgaaaagatgctgtaattggggagcaagtgggtgagggcatgctgtctgcctgcgcattgttgggggagagaagccttgtacctgtcatgggatggctcgggtcccaaggtcacagcccagctgggctctcagagcttggggagaaggcagcgctgtgtccaggtggaaaccggggacatgaggggaaggcaagggcttggaggcttggaartgttgactgtctgcatactctgtaggtcggccaggtactttccaggaactaccaacagctgttggttagggacatgggtggggcagtgagggccttctgaggggcagggtgctggccctggggtggctgggggtggaggactgtgggcagcctgggtgagatgtcctacagtgtgtaggagctccaccccactgaccctcctgcgttctgtcatcccaatggccccaggggaaaatgagggtctcttctcattgaccagaatcgaaagctgaggccagggagaagccagaacctggccagggccacacagcagtgaggcagtggaggaggcctcctgctccccagctcttgtctcctgagctctgagtggctggggctggggcttggttgccagggaagggtgggcagatggctagagagatcctggagcctcaggggagcaagttcaaccttgtggggagccctgaccccaggagagaggcaacagggttcacaccccagccgggccacgtgacacaggacatgtgagttctctctcagcctccatttcctcatctgtaaaacgggaaaatgttgcctgtcttgtaaagttttgggagattgcagtgcaagcctgtgcgtgcaggtctgagcacacagtaggtgctgaataaatgtgagttcctctccatcctatgtcctagagagccacatgggtgcctggagagccgagcttcctccctttctcctgggtcagggcctggcatcttcgtggaaggtcggggcccctcagagtctaagtcaggctctgaggttgcctcgctctgtgactgtgggctggtcccctgccctctatgagtctcgtgagccatccggcaatggggacaaagtcctccctcgtcccctgccgcagggttgttgagaaaaggtgaaatgggggagggtgagcctgggttttaaatgcaggtggttttcacaaaagtagaaatacctctggtgcctggtgctggggctgaggggagggagggggkactgcagagggagaggggatgggggcgcctctctgcctccactgaggcactgaggggaagggttaggccttaggcagagcccgggtggctggaagatgccgggcagcggagggaattggccaagatttgaaccctagccctgcatatgaccagctgggaggccttgggcaaggccctggacctctctgagctgcactttcttcgtctgtgaaatgggaaggaaagtattaagaatagtcccttttctgggtagtggggaagatcatgtggcatggagttaggctgtacaaatgtccccttcttcccctggggtgattggaggggttacagggcagtaagggatgcttggaggagaacagaggagttgtagggggagttgaggattagtagaggtctctaaagtcgggtaatgtccaaggtgacctcatggcctcaggaggacaatattaaaatttctaaatttttccatcatataattttttaatttctggaaattttttagtagctgttttatgatgttcatgataaactaggacagcaacacatgcgtgtaatttagaaagaaagaaaaatagaggcgtgtgtgcaaaaggttttactgacatagatgcatgatcaaaatatctaagtcctctccggggttcaggctagcagggctctgaggcattttgggggtcaggggaatgggaaggcatcagaacagcactgggagacttgggctcctccctcaacttgctgtgtgtccttgggcaagccacctaatctctctgagtttataaaacaagcagaggaagcttataaaacaagtacatgcaggctccttctagcaaggggaggttgagatgatctgattctaggctttgttccagatctcagataatcctggaatcttgagactttgaaagtcttctcatttcacagctggcagatgctcatggtccttctctaagcccagctgtgactcatctgtgatctgcttacatactcccaggaacagggagctcaccacttcacaggacaccccgttctgtgctggacggagctgtcatctgcctccctttctctttctctcgttcaaggtgaaactgagaggagaggggctgcggcctggcctttaggggctgaggaaggagtttttttctctcagggctgtttcctgtgagtgtcagccacagccctcaccacacctgccttctttttggggtgttctcaactttcctgatgagacaaagcctttccagctcactctttagcaggtagagggggcagttagagcatgcaccgtgctcctggtactactgccgaaccaygtaagcttgccccagccaaaagcagattctgtttgctgggcaccccctgccagtccctgagctcagtgctttgcaaatataatgcaatttaatcttcactaaatccagtgattgcaattttccagatgaggaaactcagagaggttaagagacttgcccaaggtcacacagtgacctggattcaaaatcctcttgatctgattctggagcccagctcttcatcactcttccgttcagtccctttccacgcccctaaacaggatgtaatgtggcaggaagacaagttgagacctgtgtytgagctaaaaaaaaaaaaaaaaaaaaaaaaaacccacacagtcagcaagggggaaacagatggtgggtggctggttgcctgtcagctgagcatgagttaccagtgcagggctgcctagaaagccgatgtaaacttagggccatattaatagagatagggcaccgactagaggggaggggacagttttcttgttctttatatgggcagaggttacctggagaactgtatgtatgtcataggggaagggtggagggcttgctgtgaggacatggacacacataaggttgtgagttccccatggctggaagcacttaagtagaggctgcatggcacaggtttatgggaggcatggataaggtgacctccaaggttctttaaaactgcagttttgtggctgaacttcagttgtttctagggccaccccaacactcaggcctatcagattcgccccttccacatcattcttagcaagggtcatctgagagtgtggggttcatttgttcattcattcattcattcattcattcaacaaatacaacagctaggggaatgaacaaagagacatacaggctttccctgcctggaacctacagtcgaatggggataatggataacagcacagattgagtgcttactatctgccaggtactttaagtgaattatcccatctggccccaccacaatcctatgaggaagatgttattgttccctgaggggccatgggagacagagattcagggttagatgctctccagggccctcctgggcctgtgttgatgattccgggaacctgaagctctatggtgctctctgatccccagagcttgttgttacagaaggggatgcagtggaggggccttcagcttctaccccccaccccacctctttaagcctgaccttcagtagtaacagttaccactcttcctgagaactgggcctaagggctctcctgggatagtctcatttactcctcacagtagcctcctaaggaagttactagtattatccccatcttgcagatgggaaaaccgaggcacatagaagtcaagtagcttgcccagggtcacatagctggagagaggaagacccaggattctgaacatgggctctctgtgtgtaaaggccactcttttgtctgagatgccctactgacctggcatgccatctgctccaggatccccactactggcttccctgctgtacaccactaaggtgggaggggctggtcggggggccgtgatgcaggctcagctgactgatgctttgctttgcctccagatcatgagcgtcttgttgttcatcgagcactcrgtagaggtggcccatggcaaggcgtcctgcaagctctcccagatgggctacctcaggatcggtaggtccaggggacgccggtggagtggcggggggaggaggacagggagggccctggccagggatagccaggctagtgttggaggcactgccacctctccatggacgatggatgacctctggcaagtgtcttcctttcttggggcctcagctgtttcatccgcaaatggggatgttccacctgaccccacccacatctgcaggtggtgagagcagatggaatggcactttgcaaatccccaccagctggtaaaggtgatagcctcactcttctgcttaaagccgtcagtggctgctcatcacactagaataaaatggaaactcctcaccatrggatccagcctctgcccacctctctgacagcatctccctgcgattctccaccccacaccttgctccagccacactgacctcaccaaccctgtccctgtctcaggccgattcctcattgctctcaggccactccccagggatgccttcctcrgcctcaccctggctgaagtggaccccagcctgcacctccagcccagcaccctctgtcgcatcctcctgtgctatgtgtgatgttctgcttttgtctttgtactcactccagactcaggactgcaagagggcagggcctgggctttcctgtgcatcctcatgtccccaaaccagtggttccccaagtgtggtcctgggagcctggctggggtcccaggggcacccctgagcacctccctgctctccttgcctttcagctgacctgatctccagcttcctgctcatcaccatgctcttcatcatcagcctgagcctactgatcggcgtagtcaaggtgagggctcaggagccccgctgccccctgccccttcctgttattcacacccactggtggtgggcagtgctgggtgctgagagggtgggaggcgggtatgttaggcggtcccacctgmgttctggagatcttcacacataccttttggagaaccatgtttctccctgagattccctgggcaggtgacctcagttccctggtaacatgagcctccacggggccgggcatggtgggctatgctggtcaccgacactttggtgagaactagctgatgactcacatccttttaaacggcaggtggaagcagggaattttgagagtgaaaagaggaagtgttgtttctgggggtgagagacgggagaaagcactggattttgtaatggatgagaggagccgaagaagggggaaagtaggatgcatgcagctctatccatgcagtgacaggagccagcaccctgagggggacctacgccctggaaggcccccagagagctcatgatctgattggggaagatgggccttcagagagacagggacagtctagtgtgacaacgaggggctcctgggcccgaggcaaatctggtgggagagttgagatgggctgtagctcaatcccctgcagaagaggaacccgcggtccctgggtccccagaaaggcaggaagccagggcctcaccacatagccatgggagtaggatccagaaagagggtccttcctgtgcagacaggggcctggcccttgcagggccggaggagtggggcgatgatttggtgctggtttggaatgcgtccaccctgcctcaaatgccagcacccactccccttgctaacactcactctgtcttggaacccatgctgcctggggaggccgtttgcctkgtgcagggtggctgtgggtgcttgtgcagaaacycaaagggttcagctagagaaatggagaaatggagcaggtggtccctgaagactctgagatcagtcaagattgttctggttgcctcctgagtgattttagacgaccacatgagacaccaggaaaccactgttgcagtgattttgtccccagctgtgagagcatatgaatgaatactggtcatggtggtcacttgctttcaattgaagaagagggacttcagcctcttcctggcagggcctcttactgtgactttggacccctgggagtggctggtggaggaaggtccaattgtatgcggggcgtggtggggagtggggggtgggggggaggggctctctgctgcctccgggccttcactcatgttggtctttctgcctccagtgccccgcccctccctcctgttcactcctagtctccttccccgatctagccctggtgtccccacctccagcaagtcctctctggtcccctctcctctgtaaaaagtgcacaaagcccttccttgctgggttcttgtgagcaaattgagtcaaatcctgctctttgagccctgatagatggggatggttcccttacgtctcctgggacaccaagactcctctcattcagggcctgggtcttatccactccctgtccccagagtgtcactcagagggaggtgacctcaactgaggagggcagggaaggtttgggagagggtgggaaggggatgcatgaggatatcaggctgggtggcggagtgttggctgcatgcaggggacacttgacggtgctgggcctacctttcagaaccgggagaagtacctgctgcccttcctgtccctgcaaatcatggactatctcctgtgcmtgctcaccctgctgggctcctacattgagctgcccgcctacctcaagttggcctcccggagccgtgctgtgagtacccagcccccacctctcaccggacagcagagcccaggtctggcatgggagatgggaggggaccagacacgrgccctgtgctcaggctggggagggtaggagccctcttcctggctggtgtcttgacccagtctctgagtccctccacattgccccaagtttcttcctctgtggaatgtacctgcaatcacatctcatcagcctgccttatgagggttacatgaggaacacacacattgggggtgcagcccatggtcagcactcagtcagtgcygctgggagtgaattgacacctgaggaaaggacatgtgcgctttttagcccccagcccccagkattatttcttctttggaaccaagttgaagaaaggaagagaaggatgattcatgccagtgagcgcccactgtgkggtggcttgagggctgctgccagtcaaggacacagtctcccaaacctgcttttctcactctccccaactgttgtccttgaagagaccggggggctacatcatggaagggccctggcccgggagtctggagaccttggttctagtcttgggtctgccaccagctcttggtatgaacatctgtgtgttcatgtctctctgtgcacaggggacgagagtcactgatgtctgtagctgagacggtctctcaagtgagggcctactatgtgccgctcagtaactgggactttaattgctgctcctcattcctcctccttgtatttgtcctccccagagctcctccaagttcyccctgatgacgctgcagctgctggacttctgcctgagcatcctgaccctctgcagctcctacatggaagtgcccacctatctcaacttcaagtccatgaaccacatggtgagtctggggcagggaaccatgcccatttgctggctgtgtggccttgaacaggttacttcacgtctctgtgtgtctgtggtttaggccaggttccctggagttggrgcttgggaggaagattcttgtgctggtgatttattgagggagccctctcaggaagaaacttgtcaggagtgaggaaggcaggttcgagaaaaggaggaagccaagcaaagaagcaaagatgtggctgtaggagcagccctgcatgatcccagagagggctttggcatgtgaattgcaacacagacataatatcagtttttattgttgtctaatgaattatctctaagcatcatggcttaaagcaataaacatttattatttcacacagcttctgaggatcaggagcttgggagtggcttagctgggttcttctgactcagggactctggtggggctgcaccagagatggtacctggggctgtggacaactgagggcttgattagatctgaaggatgmactcctggtggctcactcacagggcgtgggctctttgcctaattcctcatcctgtggacttgtagtagtgctgcttgagtgctctcctgacatggctgctggcttcccctgcgggagtgatgtaagagataagcaaggaggaaaggcagtgtcttttaagacttctatcacttctgccacattctgttagttagaagtgmgttgctaagtccagcccacactcaaggggagaggaaataaacaccacctttagaagggaggcgtctcaaagaatgtgtggtaatatttgcaaatgaccacagaggcagtctcacctagggcgagttcccctgcatcagtcattggtttcaagctgcccctaggggagggaatgtaacctcccaggtattagtggattaggtggtccctgtcagccaaaatgatcttstaragaagagcataggtgtggcccatgggcagctgacacctgccagctggggatgggccggtgcgccagcctgggaagcagatctggagatagtagccacttggcttttcttggtttgcccgtcagtgggatggggctgaaggtagcacctgcttcctaaggctgctgtggcggtcgaccaaggtgayggctgtgccacgctgtgctcgtgtgtgtgtggagggtgggatcattattcccggatgtgtgggtgctgttggaattccttatgtccagagacattgatgtggcccccaaatctgttgcagaattacctccccagccaggaggatatgcctcataaccagttcatcaagatgatgatcatcttttccatcgccttcatcactgtccttatcttcaaggtgagtggatccctgccctgcggctctgggaggggtggtgaggctgtgctgggcccaggcctgcccatgccaagctgttagaaggcagggacatgtgtcctccatgcctcctctcctgcttttagctcctttctcttgctttcccatgccagctcctctgactttacttgggatcctccgagacagcccatttagggcatgtgaatccgtaaaggccacctgcgttcagatgtctaattccagctgtctggaattagatttggactggcctgcgtttgaatccaagccccactgtcactagctgcgtggttggtcttcagcaagtcacttctctctgggcctcaggggcaggagtcttgttttgcctgtgttacagttttatgtaattcaggcatcaaaatgtacctgagattatgttaatagaggtttggtgatgagaaggcaggaggggaatggtctcattcttctctggggtggtcaggcccagaggatagggtccagcttcaggtcccaggtctgagtgatggtgaagcactggagtgtgttcacagcagtacaaccagcaacgtgaagagacaagaaaacgctgccatcttaggaagtcaaaaaacccccacaaaacccaacaaagacctgagcgtttattcagcatggraaatagaggactcaagggggacctgactgctgtttcttaatacctgaagaactcttgtggggaattttgtgggatcctagaggccacaatgggggcctgtggcctgaagccacagggatgctgatgaccacagaaggaagggcttttaaaaagtgttcttttctgattataaaagtaacataggtcatagtagaaatttaaaaactacagatgagctggatgtggtggctcacatctgtaatcccagtgctttgggaggctgaattgggaggattgcttgaggccaggagttcaaaaccaacctgggcaacatagcaagattctgtctctacaaaacataaaaaaaaaaaagttggatgtggtggcgtgtgcctgtagtcccagctactagggaggctgaagcgggaggatygcttgagcctgggaggttgaggctgcagtgggccataatcatgccactgcactccagcctaggcgacagagtgagaatctctctctaaaacaaaaaacaaaaaccaaaaaactacagataagtagaaagaagacaagcactccaccatccacaccccacacagagagcatcactgctgacaactgggtgcatttccccccagcctttctgtggtggtgggtgggcatctgcagaccccagctcctgcttccatctgaggccctgggcagtctctgctgtcacctaatgccaacctagaaacagaaccttgccccttttagcatcttctccaaggactgacctagcacaaacgcactagtgagtgtacagtgagaacacccctgaaggcctcatgggggaagccagtgtgggctttccatggcactctctactgcaggacccctccgcagaccccagcacacagctccgtcccccagctccccttctgttttttatcctccagaatgaggggcttccctctttgaccctcattctgcctctctggccccctccaccgacttgattttccctgggccttcatgcttcattctttgtcactccgtacctccatatgtctccttgccccacctatgtgcccatcagggaatccatcaaacaagaccttccagtacaggaccctctcctcttactcagggggcatcctgggggttttctgttgtttcttgagcttgccccttgggattgtatgccccactctggaaagcttctgcccaattcttacattaacttgcatcagctgatggacatgtactaactgttcctcctttataaacatggaccaatactgcacatgctgttttgtaatctgcttcagaaaacaacatatcggaagcaattttgaagaaaacatgtcccaccatcagctctgtttcgagatgggcagggctgtctcaggaggtagtgagcttccaggcagtgtgggcagtcaagcaggagctgtgggactattgccagggaaattggagggtgggctagaagccccccaaatccccttgctatgtggtatctgtggggcaatgaaaagggcaatacctggaatattctggactggctggtgaggaacccccaaccagaatgagaggtccgagcaggagcagctggatgctggcttctggagagagtggtggctcctgcctggcatatgtcctaggcctgctggagcgtgagaaggacgctcagcaaagcacagcctgacctgggcctttttccaggtctacatgttcaagtgcgtgtggcggtgctacagattgatcaagtgcatgaactcggtggaggagaagaraaactccaagatgctccagaaggtgagtgtggctgcaggtgggtgccagccctgtcactaactccctgtgccatttgggtcaagtttccttccctctctggaccttggtttctctatttgtaagatgagggttggaacaraagaaatgtgttctctttcagttctggtagtctaagattcattcactcactcattcatttattcagtatttactgcctctcactctttgctagtctcatatcgattccaggaggcgcagaraaaactaagatgccacctctgccttagaggagtgtacagttcagacacatagatacaattacaacttggtgtgaagcacagggacaataagcacagaggaaggacctggcctcttctcaggtatcagggaagccttcctggaggaggtgacagttaactggtcttggagggtcaatggatatgagatagctgggaaagcagaaggaggctttccgggaagagaggatgaggtgtgcttagaagcagcttattggaaagtgacggtttaaattcctggtaacttactttcctcacctgtaaggtggagattgtattagctaagacacttttggttgcaagtggcagaaacccaactcaatctgacttcaggaatttactagctcacagaacttagcagccaaatgtaggtctggcttgggcctggctgagtcctgacatcaggatatgatctcgtcctctccaactcttgactctactttccttgatgttggcttcattttccggaagcccatcccttgtggtggcaaaaaggctgccaaaacccctaggcagatatcccaccctctcagaaatcccaacagaaaaagaaggtcccaggagtatgtctgattggaccaacttgggccacgtgcctatccccaaaccaaggactatagccagggggatggaattctactttgagtggccaagtccagccacctcgctggatctgagggatgggaccagttcttctgaaggtatatggactgagaatgttttcccaaggaaaatggtgcactgttttcaaaataagggggacttgatgctgaataggcaaaggcaartatgtccactacagggctgggaactgcacctatctcatgcaggcaatgtctagcacatagcaaatatccaagacctgccagtcattatcatcatcattttgccagaggtgggggtttgggtcccatgaccccaggttggaattgcaggtcrttcttgaccatactcagccctcatctctctgtctctcccaggtggtcctgccgtcctacgaggaagccctgtctttgccatcgaagaccccagaggggggcccagcaccacccccatactcagaggtgtgaccctcgccaggccccagccccagtgctgggaggggtgragctgcctcataatctgcttttttgctttggtggcccctgtggcctgggtgggccctcccgcccctccctggcaggacaatctgcttgtgtctccctcgctggcctgctcctcctgcagggcctgtgagctgctcacaactgggtcaacgctttaggctgagtcactcctcgggtctctccataattcagcccaacaatgcttggtttatttcaatcagctctgacacttgtttagacgattggccattctaaagttggtgagtttgtcaagcaactatcgacttgatcagttcagccaagcaactgacaaatcaaaaacccacttgtcagttcagtaaaataatttggtcaaacaacagtctattgcattgatttataaatagttgtcagttcacatagcaatttaatcaagtaatcattaattagttaccccctatatataaatatatgtaatcaatttcttcaaatagcttgcttacatgataatcaattagccaaccatgagtcatttagaatagtgataaatagaatacacagaatagtgatgaaattcaatttaaaaaatcacgttagcctccaaaccatttaattcaaatgaacccatcaactggatgccaactctggcgaatgtaggacctctgagtggctgtataattgttaattcaaatgaaattcatttaaacagttgacaaactgtcattcaacaattagctccagkaaataacagttatttcatcataaaacagtcccttcaaacacacaattgttctgctgaagagttgtcatcaacaatccaatgctcacctattcagttgctctgtggtcagtgtggctgcatarcagtggmttccatgaaaggagtcattttagtgatgagctgccagtccattcccaggccaggctgtcgctggccatccattcagtcgattcagtcataggcgaatckgttctgcccgaggcttgtggtcaagcaaaaattcagccctgaaatcaggcacatctgttcgttggactaaacccacaggttagttcagtcaaagcaggcaacccccttgtgggcactgaccctgccactggggtcatggcggttgtggcagctggggaggtttggccccaacagccctcctgtgcctgcttccctgtgtgtcggggtcctccagggagctgacccaraggtggaggccmcggaggcagggtctytggggactgtcggggggtacaragggaraaggctytgcaaragctccctggcaawacccccttgtgtaattgctttgtgtgcgacagggaggaagtttcaataaagcagcaacaagcttctgtctggctgatgtgtttctggaaatacagtgtagggagggtggagaccagccttctacctccatcaccccaggactcacccacaccccctacacccacatacacacccctcacactcacactcacatgccccacaaccacgcccaccaacatacacacccacacccccacacctcaccccctcatccccactcccacacacccacacatctacacctacatacacacccctcacactaacactcacactccccacaaccacacccaacaacatacacacccacacaccccacacacccacacccacccgcggacccccacccacacacacaccccccgcacccacacacacagccccactcacacgcacatactcccaccccccaccccccacacacacccacacccacacttacatacacaccaaccccccacacacccacacccacacccacacactcccaaccccctccacacacacatacccccacacccacacacacagccacactcacactcacacactcccaccccctacccccacatgctcacacatacccccacacccacacttacatacacaccaaccccccacacacccacacacagccacacccacatccacacactcccacccgaccccccccacacacacatacccccacacccacactcacacagcaactccccacacacccacacacatccacacactcacatccacaacccacacacattaacaccccccacacccacacacacatacacccatatacacaccaccacacacccccatacacatccaacacacagccacacccacacgcactcacatccacacacactcacacattcccaccctcccaccccccacatacccacacacacccacatacacaccaacacccccacacccccccacacacatccaacacagccacacccacatgcactcacatccacacacacccacacactcactctcccccacacccacacattcccacccccaccccctcacacacccacatacacacccccacccccacacacccacacatcccccacatacccacacactcacacctcctccacacccctccacacactcacacccacccccacacacccacaaatacacccaaacacccacactccccccacatacccacacactcacaccctccccacacccctccacacactcactcccaccgcctacacacccacacaccccccatatacccacacactcacaccccccacacccctccacacacgcccacccccacacacccatgtaaacactcacacatacctagttgctccatccagaaactcctcccatgggccatgctgagcgaggggtggtcctgacccaatgctgtctgatcatgaaccacagcccaagatgatgcaccctgatgtctccctaatcaggcgtgcactccactcccctggggctgggtcctgctctggacactggggaagacctcaacagatgagactcgcctccagttccccccagtctgcggtaggagggacagatctgcaaaagggctgccacgatagggaaagcctaggggacctcagacgtggcctgagggccagagaaagcctcttggaggctgtcaccaagtggagtctgaaggatgagaaggcagcagtaagcagaatgggaagggtgctctaggtctaggtagcaggacacgcaaagactctatggcattggggagaggagctggggcgagctgctcagcgtggctgcaagtggggaggggagggagaagaggtcggcccgctgtggggctgggtcaggaagagtgtttgcacacagtggggctctttaggtgcaagctcaccctggctaagttcagccaagaagggaatttacaggaaggacatggttgcaagtaacagaagccttatgagccaagtttattatgagaaaccagaaggtggttcacgatgtttcttggctctcatacaaataaaaaatccagggatttttggcttcaggtatggcaggatccaggactacaactctttaataatgtctctctgtttctccatctcttatcttttctccccggtgtggctgagctgttgaggacttacctgaaagtaaagttaataaagagaccagggctgtttgaattgggatctgtcaccaataccaaaagagccctcagagccttgaatgtcacaccgaggaacatggactaatcctgagacaggtgtctttgaaggattttgggccaaggagttacaaggtttgggttttaggaaggaagagcccaaatgcagggacccctacaaaggctggggaagtcatcctatggggcggcagggacggggatgagtttgagaggcattgtcaaccttctggtggtgtcagtttttttgtggaatggcagatttcttcatggatgttatttgctccttatcagayccccaagcagttggtgcagtgtaattcacagaaatggaaagcgagctcctgttcacacttgagggcagaggcccagagacatcaagtgactttcctgaggccacacagtggtcagagatgagaccaagcaccttttttttctactccgagtggaggcttttagacgggctggggcccagtctgtgtcagttgttgcttcttgcaaagacccatgggaagagggcccgctgagaagccccggcaagtgtggattgggagcagaggtcacgggaggagagacattggcccagccttgcatcctatcacaaggagattgaagggccatggctgcgtgtgtcacaaggaccaggaggccctgaacttcccggcgcgactctcccgtccttcccgccttccccgactcccacctctggcctggagccgaagaacaggctgagctgtgtagtgggattgtgccctgtggccaggcagctgggagggggccacccgagggacaggaaatagctgggtttggggaagtccgcatggctagccaagccaagcgagcccacgatcgcctgggcagccctcactgaggccctatcaatgccccgtttgaggctcacacaggggtcctttgacggggctgcgatggtttggacccactgacagcgcctgtttgagcttcatgcctggaaaggagccggccccaggacagagggggctgcttccaggcctgggcaggtgagggcagcctggagtggttgtctcttggagggaaaaaagagctggtaaaattaaacctggggtgctaagcggggcaacttcaggtttctcgggagctgtgatggtagcaggaagggtccccgtaattgagtgggcccttcagtgtgctggctccacaaagctcccagtggcctcacgcagcaggtgctgggtggtgatcattcctgaggttcagggaggggctgcctctgcccacagtcacgcattggccaaggggcagacctgggcttggacttcagtccacccaaatggacctgagcttgtctctctagacctttctgggtaacctcgcccttcctctgggaatttctacctcacaaggccctcatttaattcctattccaggctctgagccctcttgggagggccctggcagaagcaggaggcctcagaggcagcagggagcttttggatgttgcggaccctcggatggtggtgcccagctctgagcagaggatgcgaaacgggggatggcaaaggatgcatcgcgttttggtggggctagatttgcgcttccttgggggacatataatgggaggtgctcaggaagcagctgggtctctaggtctggagtttaggagagcgaggagggaggcaggttgagatgtgagtgctatctttggacatgtgggtgggatatcaggttgggctggtatcacccaggtgttaacccatcagaaggatgtgctgctgctccgtggcctccccagacaggccggcagatgaaagcacacgcctcctcaccctggattccagtttggctgaccatgcgtggggcctgagaccaagatagcacatgggaggtgtcatgaaccacatgtgacacctcagatcatggggtctgtggcccgaatggggcctgggcaggaggagcagcccagctgcactgcaggctcctggatggggcgatgagcatggccactttgcaggtgaggaatctgccctgtgactgtgggcccctccacatctctgcctgacttttgggaagaccagagattcatgtccaatccggtactctggcagtgtctccaatttgcaatgaaaccgtttaagtgtcaagaaaagcagtcaggttaaaggaagtcaggggcaggacccaccctcgggttctccttgggtctttgggtggcagcagggcctctgcggagggtataagcagcagccactgtgtgtctctgcagccacaggccttgcctgctgccctcccggatgggctctctgggaaccagtgctcacattccagtctgtctcccgggtcccaggaagaagtctccctaattagccaccaagagcacgccgatggtcagtgggcatagcagagagctgctggcacgagggagccacagttctaaataaataaacaacatccacctgggaaacaattttgctgccatctcagtggcccagatagtcgaacagaacactcgcctgctgcttcctctgctctatgtgctgggaggacatgcgaggctggaaaacagctgggccaaggcctggagatgtgaccgggtatcctgagaaaaggacttgggtgcaggtagcttatttgggaggtgatcccaggaaatacagtgaggggaagtgaggtggggacaggataaaagccaatacaatgtgcatgaataagctggtcacctctgtgggcaaccgcggctcactcctgctggggaccttctgaggaacggcgaggagcgtgtctcagaactgttcaatgggggatggggacgttggggtcttctgatccctgcaggttgcgggttatacctggggatgttaaatccccaggctgcctggcccactgcttgcgtccctgggaactgcctgcagctgtaggtgagctgaacccacagtgggctgaagggccatgggttggggcattaactgggccagctagagttcccagtgctaaacctgagcccgctcctccagatgctcatttcttcttccagtgtgattgattacaggggccattccccgtgggaagctctcgcagtcgctcctggggtgagggctgaccctctggccccgagaaggcacgtagcaggggtggaccttgtatttttaacaaccaggtgagtagcatgggtggccaggtgtagatgacctttgagtttccttcagagtctgagcttcagggtttcacatttccctacaaataaaatgggtcaccatgcattgagtgcaaactctgatagggagctagtgagagggctggagtctatctgggaggctctgaaaacaggagagtgactcattcagtgctagagaagagagggagatggtgggaggggaggagagggggagaaagggaaagactagagaagagagggagagggagggagggaaggagagggagagaaagagaaagactgacaatggcctggaaggtggaaggaagctgacagtgaagagctttaaatgccagccaagtctgaatttccatctagaggtgatccagtgctaacaaaggctttccccccggcaatggtgacagagactgtcactgctaactaaatgccatatcctggccctgggcatccaggtagagtcaggtaatgtgtactccttctctgaggcagttaagagagatgcttgctgtctctctcttgtccacatggcctgagacaaggacttggaaatggtggaggcagctttggagagggcctatgtggggggcacccacctggcactggacggtgctaggagagagaagcaaaccctgtattaagccattgtgatttggggggcatgtttgctattgcaacatagcctatcctagcctga

SEQ ID NO: 8686 - DNA, 18059 bp, Homo sapiens
caaaacagtcttatgttggaagaagatgccatccaggactttcacagctagagaggagatgtcaaggcaagctgcaaagctccacaggacaggctgactctctttttagaggtgaatgcagctgatgactttaagttgaagtaaatgttcatttactattttgtaaatcctggtgtcattaagaattatgcgaaatctactctatctgtgctccataaatggaacaataaagcctggatgacaacacatctgtttacagcatggtttactgaatatttcaagcccactattgagaactattgctcagaaaaaaagattcctttcaaaatattactgctctgcaccatgtcgatcaagagctgtgttggagatgtacgagaatattcatgttgttttcatccctgctaacacaaacatccattctgcagtccatggaccaagactttcaagtcttattaagaaatatatttcataaggctattaagaaatagctatatatatatatatatatagccttatatagtttatatagctaccattgatagtgattccattgatggatctgagcaaagcaaattgaaaagcttctggaaagtagtcattattctagatgccattaggaacatttgtaattcatgggaggaggtcaaaataccaacattaacaggagtgtgaaagacattgattccaacccccatagatgactttcaggggttcacgtcttcagtggaggaagtcgctgtagatgtggtggaaacagcaagagaactagaactagaagtggagcctgaagttgtgactgaattgccgcactctcatgatcaaacttgaacagatgaagagttgcttcttacatatgagcagtgaaagtggtctcttgagatggaatctcctcctggtgaagatgctgtgaacacggttaaaatgacaacaatcgatttagaatattacataaatttagttaataaagcagtggcagggtttgagaggattgactccaattttgaaagaagtgggtaaaatgctatcaaatagcatcacatggtatggagaaatcttttgtgaagggaagagtcgaccaaggtggcaaattgcattgtcatcttattttaagaaattgccacagccacccccagctttagcaaccaccaccctgatcagtaagcagccatcaacatcaaaacaagaccgccatcctcttcagcaaaaacactatgacttgctgaaggctcagatgatggttagcatttttagcaatacaatatttttaattaaggtatgcacattggtttttctgacataatactattgcatacttaatagactacagtataggataaacacaacttttatatgcactgggaaaccaaaaaggttatttttgagatatttgctttactgtggtggtctgaagctgaactcacaatctcaccaaggtgtgcctgaacctctttagctaactggccactgccacagtccactctgtgttggtcaagatgccccagagtggcaggcacactgtgtggtcacatccaagggcctagatatggtgggggctccaaatggatctagatatgtgagatctctctttgatttgacttcttccaacccaccattttctgggtgctgggctcatctcacccagaaagtaggacccaatgtgacagttcctgcccagttccctcctgtggtagccacttgacccaggggcactcttgatccttgcagcctcacttacacaccctatctctacccctattaactctctccaatccccactccccctgctcagcttgtctgctgcccagtgggggccccacccatgctggcctctccttttgcaagtccccattcctcatatggtttcttcagagcccctttctttggctttgaggagagatgccctcactcgcttccccaccaatcctgcccacttctacaatccattcattatcctaattgcctccgtatacagactggagtgagaggagttgatgtgatgggtgtggatacagggctggtgctgtcatcttctagtaagccctgggagaggtgtctgagcccaggtgtcagtggttttctttggaactgtgagtgcataacacttctttgccttcagccttaggccatagttgctagttctgggacaaccagaaaagccctacataatctcgtgttatgtgcagagctgagtatagagctccaggtatgatctgactcacttaagatcacagtgagtctattgtattgttgaactgttagcttagacatctgttactgtacctacatggcactagcctcacgcctagacaccgatctgaaagaaatcccctaaatgcatagagaagacttctcagctgagctaaggggctcccaccaggtttgagcctatctaatgaatccatgaggtagacagcctgcacatgtccacttggtttgatgaattgcacaaatccctatgggggatgtggttcatgggctgggaagtgggttaccctgggaaaggtctacaggacagaggcagggatggagacaacagcatggtgagttcccaacccacccacgatgataggtgtctgaggcagaaggtaaagaggctgtcacctggtgggtgtcataagactcaagtgtcattgttgaggcacatgggtaacaaagcgtggcactggatgggggtagattcttcctatttctgtgaggatcagggggactccctggctctcctgctaaaggtggctctagggacaggaagagtgtacttcttgacagggatgtcagagcactgatggtgacaatcagtgtgacactgctcacatgactgaacaaccgagaagagcccgactgtctactgaacaacgggaagagcccgactgtcaatgacggagctctgttaaatatagttaaggctattttgttgaatgaatgaagccagacaggaaagaggacagtatctttaatccatttatagaagttaaagacaggcttatttaatctctatgaagacagagtggcccttacctctgggtggagcaaaaggcaccttctgaagtgatagggatgttccttatcatcttgatccggagtggtagttacatgcatgtgtgcatatcaaaactcaccaagctgtaccactaagtgtgttcttcctcaataaaaataataaagaactacacttataaagaattttttaataatataggaaaatgtctacactataatctttagctaaaaaaaaaaaaaaaagaagccgcctacagaatggtatatgcatgagaacaattaatcgaaaagtgcatgggaaaagtcaggattgaaacatcatgttttaaaagacattgttttgatactgtgagaatgtacctaagtttttccttttttctgtttttcccaattttatacaatgagcatgtgttggttttataattagacattttgtttgtttggtttggttttgagacacagcttgctgtcacccaggttggagtgcaatggcccaatcttggttcactgcaacctccatctcctgggttcaagagattctcccacttcagcctcctgagtagctgggactataggggcgcaccaccacatccagctaattttgtgtatttttagtagagatggggtttcaccatgctggccaggttggtctcaaactcctgacctcaagttatccactcgccttggcttcccaaagtgctgggattataggcatgagccaccgcacttggcctagacatttgtttttaaaaataaaagattcatttgctctttttacagcccgtctcactgttgactgatattgaccaggagtcaactcaggccccagggattttcacaacagctgctgtatggcagggtttctgctcactgtgctcatgtagttggcccttgcacccaaagtgaataattaacattctccccatcctgttgacgatgctctgaaaatatggtccagaaatggtgtgagcaaggagacagcaaagcaatgcttggaacataggtgcagtgactagacatggggcagctgtttaaagacaaaaaggccccaaaaaggagggatggcacgaaacaccctccaatatgggcatggagtctagagtgacaaagtgatcaaaagttcatttcctatggggtgtccgaatgtacttaataataaaaagagaacaagagccatgcaaactgagagggacaaagtagaaagagtagcagacaccaagcaactaagtcacagcatgataagctgctagcttgttgtcattattgtatccagaacaacatttcatttaaatgctgaagaatttcccatgggtccccactttcttgtgaatccttgggctgaacccccctgtcctgagtggttactagaacacacctctggaccagaaacacaaaagtggagtaacacacactgcaaagctgtgcttccttgtttcagcctgtgaatcctcaccttgtttcccatctagcctatatttttcaaactaacttggccatagaatcatgtagtatttagggtggaagctgccccaggtctagcacgtcatttaacagatgaggaaatggaagcttgggcagtggaagtatcttgccgaggtcacacagcaagtcagcagcacagcgtgtgtgactccgagcctgctccgctagcccacattgccctctgggggtgagtatgtcttcacatcctccaataccctaatgacagacaaacagaacatggcaaagcctcagctctgcatggtgaaagtaagaaccagcaattgccacaaacagaaatacagtgttggtccggcagcctccgggggttctgcacaagtggattaccagtgaatacaaggctatctatctttcgaaaaaccaaagttgtatttatgctattttctataaaattttatattaatttatttgttacctatttttgaactctttcaaaagcacactttatatttccctgcttaaacagtcccccgagggtgggtgcccaaaaggctctacacttgttatcattccctctccaccacaggcatattgagtaagtttgtatttgggtttttttaaaacctccactctacagttaagaaaactaaggcacagagcttcaataatttggtcagagccaagtagcagtaatgaagctggaggttaaacccagcagcatgactgcagttcttaatcaatgccttttgaattgcacatatgggatgaactagaacattttctcgatgattcgctgtccttgttatgattatgttactgagctctgttgtagcacagacatatgtccctatatggggcggggktgggggtgtcttgatcgctgggctatttctatactgttctggcttttcccaagcagtcatttctttctattctccaagcaccagcaattagctttaccttttcagcttctagtttgctgaaactaatctgctatagacagagactccggtgaaccaattttattaggatttgatcaaataaactctctctgacaaaggactgctgaaagagtaactaagagtttgatgtttactgagtgcatagtatgtgctagatgctggccgtggatgcctcatagaatcctcccaacaactcatgaaatgactactgtcattcagcccaatacccagacgagaaagctgagggtaagacaggtttcaagcttggcagtctgactacagaggccactggcttagcccctgggttagtctgcctctgtaggattgggggcacgtaattttgctgtttggggtctcatttgccttcttagagatcacaagccaaagctttttattctagagccaaggtcacggaagcccagagggcatcttgtggctcgggagtagctctctgctgtcttctcagctctgctgacaatacttgagattttcagatgtcaccaaccaccaagagagcttgatatgactgtatatagtatagtcataaagaacctgaacttgaccatatacttatgtcatgtggaaaatttctcatagcttcagatagattatatctggagtgaagratcctgccacctaygtatctggcatagtgtgagtcctcataaatgcttactggtttgaagggcaacaaaatagtgaacagagtgaaaatccccactaagatcctgggtccagaaaaagatgggaaacctgtttagctcacccgtgagcccatagttaaaactctttagacaacaggttktttccgtttacagagaacaataatattgggtggtgagcatctgtgtgggggttggggtgygataggggatacggggagagtggagaaaaaggggrcacagggttaatgrgaagtccaggatccccctctacatttaaagttggtttaagttggctttaattaatagcaactcttaagataatcagaattttcttaaccttttagccttactgttgaaaagccctgtgatcttgtacaaatcatttgcttcttggatagtaatttcttttactaaaatgtgggcttttgactagatgaatgtaaatgttcttctagctctgatatcctttattctttatattttctaacagattctgtgtagtgggatgagcagagaacaaaaacaaaataatccagtgagaaaagcccgtaaataaacyttcagaccagagayctattctcyagcttattttaagctcaacttaaaargaagaactgttctctgattcttttcgccttcaatacacttaatgatttaactccaccctmcttcaaaagaaacagcatttcctacttttatactgtctatatgattgatttgcacagctcatctggccagaagagctgagacatccgttcccctacaagaaactctccccggtaagtaacctctcagctgcttggcctgttagttagcttctgaratgagtaaaagactttacaggaaacccatagaagayatttggcaaacaccaagtgctcatacaattatcttaaaatataatctttaagataaggaaagggtcacagtttggaatgagtttcagacggttataacatcaaagatacaaaacatgattgtgagtgaaagactttaaagggagcaatmgtattttaataactaacaatccttacctctcaaaagaaagatttgcagagagatgagtcttagctgaaatcttgaaatcttatcttctgctaaggagaactaaaccctctccagtgagatgccttctgaatatgtgcccacaagaagttgtgtctaagtctggttctcttttttctttttcctccagacaagagggaagcctaaaaatggtcaaaattaatattaaattacaaacgccaaataaaattttcctctaatatatcagtttcatggcacagttagtatataattctttatggttcaaaattaaaaatgagcttttctaggggcttctctcagctgcctagtctaaggtgcagggagtttgagactcacagggtttaataagagaaaattctcagctagagcagctgaacttaaatagactaggcaagacagctggttataagactaaactacccagaatgcatgacattcatctgtggtggcagacgaaacattttttattatattatttcttgggtatgtatgacaactcttaattgtggcaactcagaaactacaaacacaaacttcacagaaaatgtgaggattttacaattggctgttgtcatctatgaccttcyctgggacttgggcacccggccattwcactctgactacatcatgtcaccaaacatctgatggtcttgccttttaattctcttttygaggactgagagggagggtagcatggtagttaagagtgcaggcttcccgcattcaaaatcggttgcttactagctgtgtggctttgagcaagttactcaccctctctgtgcttcaaggtccttgtctgcaaaatgtgaaaaatatttcctgcctcataaggttgccctaaggattaaatgaatgaatgggtatgatgcttagaacagtgattggcatccagtatgtgccctcgaggcctcttaattattactggcttgctcatagtgcatgttctttgtgggctaactctagcgtcaataaaaatgttaagactgagttgcagcygggcatggtggctcatgcctgtaatcccagcattctaggaggctgaggcaggaggatcgcttgagcccaggagttcgagaccagcctgggcaacatagtgtgatcttgtatctataaaaataaacaaaattagcttggtgtggtggcgcctgtagtccccagccacttggaggggtgaggtgagaggattgcttgagcccgggatgrtccaggctgcagtgagccatgatcgtgccactgcactccagcctgggcgacagagtgagaccctgtctcacaacaacaacaacaacaacaaaaaggctgagctgcaccatgcttgacccagtttcttaaaattgttgtcaaagcttcattcactccatggtgctatagagcacaagattttatttggtgagatggtgctttcatgaattcccccaacagagccaagctctccatctagtggacagggaagctagcagcaaaccttcccttcactacaaaacttcattgcttggccaaaaagagagttaattcaatgtagacatctatgtaggcaattaaaaacctattgatgtataaaacagtttgcattcatggagggcaactaaatacattctaggactttataaaagatcactttttatttatgcacagggtggaacaagatggattatcaagtgtcaagtccaatctatgacatcaattattatacatcggagccctgccaaaaaatcaatgtgaagcaaatckcagcccgcctcctgcctccgctctactcactggtgttcatctttggttttgtgggcaacatgctggtcatcctcatccwgataaactgcaaaagkctgaagagcatgactgacatctacctgctcaacctggccatctcygacctgtttttccttcttactgtccccttctgggctcactatgctgccgcccagtgggactttggaaatacaatgtgwcaactcttgacagggctctattttataggcttcttctctggaatcttcttcatcatcctcctgacaatcgataggtacctggctgtcktccatgctgtgtttgctttaaaagccaggacggtcacctttggggtggtgacaagtgtgatcacttgggtggtggctgtgtttgcgtctctcccaggaatmatctttaccagatctcaaaaagaaggtcttcattacacctgcagctctcattttccatacagtcagtatcaattctggaagaatttccagacattaaagatagtcatcttggggctggtcctgccgctgcttgtcatggtcatctgctactcgggaatcctaaaaactctgcttcrgtgtcgaaatgagaagaagaggcacagggctgtgaggcttatcttcaccatcatgattgtttattttctcttctgggctccctacaacattgtccttctcctgaacaccttccaggaattctttggcctgaataattgcagtagctctaacaggttggaccaagctatgcaggtgacagagactcttgggatgacgcactgctgcatcaaccccatcatctatgcctttgtcgkggagaagttcagaaactacctcttagtcttcttccaaaagcacattgccaaacgcttctgcaaatgctgttctattttccagcaagaggctccygagcgagyaagctcagtttwcacccgatccactggggagcargaaatatctgtgggcttgtgacacggactcaagtgggctggtgacccagtcagagttgtgcacatggcttagttttcatacacagcctgggctgggggtggggtgggagaggtcttttttaaaaggaagttactgttatagagggtctaagattcatccatttatttggcatctgtttaaagtagattagatcttttaagcccatcaattatagaaagccaaatcaaaatatgttgatgaaaaatagcaacctttttatctccccttcacatgcatcaagttattgacaaactctcccttcactccgaaagttccttatgtatatttaaaagaaagcctcagagaattgctgattcttgagtttagtgatctgaacagaaataccaaaattatttcagaaatgtacaactttttacctagtacaaggcaacatataggttgtaaatgtgtttaaaacaggtctttgtcttgctatggggagaaaagacatgaatatgattagtaaagaaatgacacttttcatgtgtgatttcccctccaaggtatggttaataagtttcactgacttagaaccaggcgagagacttgtggcctgggagagctggggaagcttcttaaatgagaaggaatttgagttggatcatctattgctggcaaagacagaagcctcactgcaagcactgcatgggcaagcttggctgtagaaggagacagagctggttgggaagacatggggaggaaggacaaggctagatcatgaagaaccttgacggcattgctccgtytaagtcatgagctgagcagggagatcctggttggtgttgcagaaggtttactctgtggccaaaggagggtcaggaaggatgagcatttagggcaaggagaccaccaacagccctcaggtcagggtgaggatggcctctgctaagctcaaggcgtgaggatgggaaggagggaggtattcgtaaggatgggaaggagggaggtattcgtgcagcatatgaggatgcagagtcagcagaactggggtggatttggkttggaagtgagggtcagagaggagtcagagagaatccctagtcttcaagcagattggagaaacccttgaaaagacatcaagcacagaaggaggaggaggaggtttaggtcaagaagaagatggattggtgtaaaaggatgggtctggtttgcagagcttgaacacagtctcacccagactccaggctgtctttcactgaatgcttctgacttcatagatttccttcccatcccagctgaaatactgaggggtctccaggaggagactagatttatgaatacacgaggtatgaggtctaggaacatacttcagctcacacatgagatctaggtgaggattgattacctagtagtcatttcatgggttgttgggaggattctmtgaggcaaccacaggcagcatttagcacatactacacattcaataagcatcaaactcttagttactcattcagggatagcactgagcaaagcattgagcaaaggggtcccatakaggtgagggaagcctgaaaaactaagatgctgcctgcccagtgcacacaagtgtaggtatcattttctgcatttaaccgtcaataggcaaaggggggaagggamatattcatttggaaataagctgccttgagccttaaaacccacaaaagtacaatttaccagcctccgtatttcagactgaatgggggtggggggggcgccttaggtacttattccagatgccttctccagacaaaccagaagcaacagaaaaaatcgtctctccctccctttgaaatgaatataccccttagtgtttgggtatattcatttcaaagggagagagagaggtttttttctgttctktctcatatgattgtgcacatacttgagactgttttgaatttgggggatggctaaaaccatcatagtacaggtaaggtgagggaatagtaagtggtgagaactactcagggaatgaaggtgtcagaataataagaggtgctactgactttctcagcctctgaatatgaacggtgagcattgtggctgtcagcaggaagcaacgaagggaaatgtctttccttttgctcttaagttgtggagagtgcaacagtagcataggaccctaccctctgggccaagtcaaagacattctgacatcttagtatttgcatattcttatgtatgtgaaagttacaaattgcttgaaagaaaatatgcatctaataaaaaacaccttctaaaataattcattatattcttgctctttcagtcaagtgtacatttagagaatagcacataaaactgccagagcattttataagcagctgttttcttccttagtgtgtgtgcatgtgtgtgtgatgtatacaaagagagagataattgtatttttgtattttcttttaaataatttttaaaattgacccttttcctgagacaaattgccagaatagtttgtatttagagatggtacctctaagagtaaggttgctggttgctgagcaattgacttgaaaacttttaaaattcaaattttaattccactactcaaaagaattgccatgttttaaaaaagagaattggtgccataagttagttgtctatgtttgaaaatgaagaagatatgcaacgtcatggcctggtcacttacccgcagccctgagttgtaggcacatcatatgtgagaatgaggatgcttttctttcatttaaaatccctccccaaaacttggctctaattgcagtcatgacaatcatgtacatttggatttatgtgcacgagtctcttaccctgagagaggacaggtgctacaggtggaggggacccgtctgggtcacgttcacattttgaacatgctggttttcagtcactgcacactcatctcccagcgcaggtcatgggcagcagatgcaaaagctgcccgtggtcctatttggaggtgcatgaaatgagcagaagacagaacagcttgatctgactagaagggcagcttgtccctaccaagacttgaaggattgcctttcatctgttagggtaaaaggtagaatgaaccaaggaagggcaggagggggctggggttagggtagaaggaaggggccatggagaagggagatccatcccataggaggaaggcagtgcggcagggaggtttgaaggtatcagcttttgtggctgacatacatgcagtcatgtcaattgctcgtttttccttttccatcttattaaatgtcttccaatgttagcacgaagaaaagctatttgcagtgttgccagcctttccagagcccgtccccattacctccccaggcccatgcctttactccttggagtttcaactcacgaccttcaggatctgactttattcaccaactctggggtgaacgtaccttctgtctccacccagaggtctctatcaaagaggagattgcatgccatggataaagtcaaagtagaggtgactgtccttaggaagagtaatgtgaaaattcataaactgggattctgtttacattttgtactccaggggttcttagtttaaatcgctctgaataaattaagatgcaatggcatttcaactgttatgattaaatttacaaatcatttattttctatcacggggagagatagagctccaaatgcaaacataactgctcaagtgttaacacttataatgaaaacataagaattaccaccaactaccctgggggctagaagcagaaatgtgaaccagaaaacaaatcatgaactttcctttttttttttgagatggagtctcgctctgttgcccaggctggagtgcaatggtgcgatctcggctcactgcaaccactgcctcccgggttcaagcaattctcctgcctcagcctcctgagtagctgggactacaggcatgcaccaccacgcctgggtaattttttgtatttttagtagagacagggtttcaccgtattagccaggatgctctcgatctcctgacctcgtgatctgcccgcctcggcctcccaccgaagtgctgggattacaggcatgagccactgtgcccggccaacaaatcatgaactttctaactgcagttccttgtagcttgttaacacatccacttacttattgtcagagtacgtggagattttccacaaccctcggggataaggctgaacagaagaggcaaaaacgtgaaaacatttcgatagctcctatactttgaaataaaattcactgtaaaagttgcttgtatttttccaaaacagagtcaacccttaatatttaagattctgtatacaaatacatatttttatataattaatatatattgtcatatgacatatatctttatattaatatgcatgcatataatatatatttccttcctaattttctataagcaattttacaagactgacttctatttgcctccttattgttactacgtggtttgataatccgttttgtgtcattgtgattctgtcatgttttggggacttatttttgtttctctgggtggtcactagtttttttaaagcattcatggaagagtgtgaatcttttacaagctaggaagccatggcaagccttgggtcatactgcccccgcgaggccacattggcaaaccagcaagggtgttcaacttccagacttggccatggagaagacacacgaggaggcttttcacattcagctctttaatgtttgtctctgccggcaccatcccagttgtgaaaaagaggtatttccacagcggctcagggtaggtagtgcacagctcacattcatcatttctgaaaaccgagaggagtctccattcggggtacaggttgatgcctgtcgtggaatgaaggttccaacacccagaccaatctctgcagtgtgctgctctcatgagcttgcaacaagatcagaaaatgttttgtgactaagcatttttcatattgcataaaatgcttcaagctcctcccttgtttctctctataatcctgtatatctgatgattgtgggtaccaagtgtttgaaataatcaaatgtgatttgatgttggtaaatttctttttttttttttttttacttctattttttttattatactttaagttttagggtacatgtgcacattgtgcaggttagttacatatgtatacatgtgccatgctggtgcactgcacccactaactcgtcatctagcattaggtatatctcccaatgctatccctcccccctccccccaccccaccacagtccccaaagtgtgatattccccttcctatgtccatgtgatctcattgttcaattcccacctatgagtgagaatatgcggtgtttggttttttgttcttgcgatagtttactgagaatgatggtttccaatttcatccatgtccctacaaaggacatgaacatagcaaagacttggaaccaacccaaatgtccaacaatgatagactggattaagaaaatgtggcacatatacaccatggtaaatttctttatcattcgcactctcctttctctattattgttattgtaactgaaccgcagattagtcactcattgcttgcagaatccaattaacaagagcgaggtcagatataaagaaaatgatttattccaaacctccttcagggaagaggtgcagcctcctgcctctaaatgcactgcttcgccaggcgtggtggctcacacctgtaatcccagcactttgggagaccgaggagggcagatcacttaaggtcaggagttcaagaccggcctggccaatatagtgaaacccctgcctctactaaaaatacaaaaaattagccagacgtggtggcgggtgcttgtaatcccagctactcgggaggctgaggcaggagaatcgcttgaacctgggaggtggaagttgcagtgagctgacatctagccactgcactccagcctgggtgacagagtgagactctgtctcaaaataaataaataaataaataaataaataaataaataaatagtaaatgcactgctttgcttttggagcagaaagcaggcactttgaaaaggcaggggaggaagtgagcaagggcagggggtctgcacactggcatggtgcctgatctatccaggcagttgaattggcactttcataggcagaaataagttgaaaaagtggcctaaaactctctaggtgggagtggatagtgggcatgccttcaacctgcctttctggagggtgagttccatggcaaccccctgaagggtgagagttccatggagatcatgctttggtctgtaaatcagctgttaactctctagaaagttctgtcttggagcatatagttagatgaacttgccctgtaaagaatgtctggtgaaggggaagtaaaaggtgagatttgcatttctaaagggctaagtagaaagtggggtacaagaggaaaggagaaaagagaaaataatttaaaaaataattgtaacttattcccttttacttagaaaaaagggaatactcagttacattatcacctcgtttacatcaaaccctcttatggaatcctatggtttgaaaacaaaaaggttgttgaggaccagtgagcccaacccctttgctttataaatgaagagcattgcctgccctaagccccagagactctgatgtcgtgggtctggagtgggctccaacagcggcatgttttgatggtgcttcccagtggcacgccagcgatgagcctttgagtagggaaagtaggagcactcgtgactcccttcacgatcagcacctgtgtgctaataaattcacaaaagccaacatattggagtcactcagggagttttacaaatagtgaggttaaatccaacctcaaatagttctgattcgatctgcctgcattgctgccctgtggttccccactgtagaagctccccaggtgattctaagtgtagccaagtctgagaaatactgcctaaagcctgttggactgacagcaagggctgttgtctgagcaagactttgcctggcctggggtggcatgtgcaccaggaagagtctcaactttcataacagaacattccccaagctggtttttttaaagcatgtgaatctagacttcattggcaataccaaagatctgtatttgaggctccaagtatttcactttcatttttggttttgggttatgttttcacccttcctttccaagtgaaaagtaaacagaagtgggatgtctggcgcccatgctgagcttggcaacttcaaattcaatagagaagaagtctcttgtatagaaaagggcctgtctgagatgtttctcaaataaatatagattttgcttatgtggctaaaggattcttctccccccatttccttatccctgcagtgagccatccttcttaactctttccatgaaagcattattcctgaagaactgggaactcatgccagccctgatcaggcaatgataattctgcagagaattagaatttagatttaaattgtcaactcttatacatcctggcatatggtttaaacacatgtacacacacacaaacacctcctactatttactgaagagcagatatctgataacttaatctttttggttttgagtcaagacaattcctccttttgaaactgcataccgctgaatataataaaatgtaattaagattaaaaataagaaactaatgggagaatttcaatattgtctatgttcactttaaaattcctctacttaggtttactgccattaccaaagactattcaaaaatcctttttaggagaatcctaatggtttcctgacatataatcaaataaggactctgttgattggctaactcaatcttcctgtgccaaaaagcagagcccagcagagaagagggcagggacttgaaagtcagactgactcgagttccagccttggggctgtgggagcttgggcaagtgacttaacgtctctggctctcaggatctaaaaggatttccagtagtaatttggggtgttactgatacaggagctaaaaagaaattatttaggtggttagtgagggtcagagagtcctcggtaagatttgccttttaacaaaaagcagccccaaaatcatttgtttgctaacaaagagaagcctgtaaaattgagctgcagacatagataagcaagctggaagcttgcacgggtgaatgccggcagctgtgccaataggaaaaggctatctgggggccaggcatgttcaacatggattctccatcttcccttttctttgtcaaccaagtgtacagt

SEQ ID NO: 8687 - DNA, 15753 bp, Homo sapiens
  misc_feature (1)...(15753): n = A,T,C or G, or insertion/deletion polymorphism (see Tables 1-2)
aggcatcctcactgtttttattttagtccacttgacctttggggagtagttccactggctcataagtatcagccccccatagcacagcaccccacactgagcccggaagcaataaagaatcccaatctgctgtcactaaccagcacgctcaactgccatgccctttactcttctcatctccctgctttcacgtcacatcaactaatttctctatgagtcagcctcaactctcccaacactctgcccacccttcttctactaccttccagtgagctcctcgaaagaagggtctgcggtgaggatgcccctttatctctgcctatttccttcccrttacaaaaacttgaaacctgcctttcccatgttgatttcactttattctcatctttacccatggggtatgcctcctgcaattcctcctagacaatagaatgagaaagaggggtcctcgtcctctttgctttccatgaccatttctccattcttcacctctgtgatgtgtcctctttgaagtccctgataaattcattaccaccttctctccagtcttactaatgttatctgcacaagtgatttccaaacaggaagattttcaaacactgattcctgaagatcacccccaactcgctgaactgagaccaagacctccaagattatggcttaggaatctgcattttttttttttttttgagacaagagtctcgctctgttgccaggctagastgcaatggtggaatcatagctcattgtaacctcaaactcctgggctcaagtgatcttcctgcctcagcctcccaagtagtgaggacaacaggagtgtgccaccatgcccagctaattgttaattttttgtagaaatggagtctcactatgttgctcgggctggtctcaaactcctgaccttaacccatcctccgcctccgcccccaaaagtgttgggattacaggtgtgagccaccgtgcccagcctagaaatacccactagaagcttctgtgtagacaatctgcttagtgatgtttggagacaaagtacctctttattgtattcattgacaaaactctccagtcctctcccatcttcatggaaaattttcacagttcatttacggccctctttccaacacattcactgccaatactcttattgacaataactgtattgttgaaccttccagtatcctgcattcccggatcaaggccccctcaaagccctgatatgcaaatatctgggaaaagaatgttccagaggaaaggaacagctaatccgaggcccctagggtaagatgtgcctgggggtttggagaccagtgtggccagagcaaaatgagcaggaggagagaattggatgatgaggtacgagaggaaggagttaggacagtttgagtaaagtttgaaaaccattataagggctttgacttcaactatgagtggaagtggaatcctccggagagttttgaatggagagtgatagaagttgtcttgtgttgtaacagtctggctgctatactgaaaagagactagttggcggcaaagggggaaatgtggaagccagttaagaagccatcataacccagaaggtgatgcctaataacatctctctgggagcagcggagagatgataagggtttgccttctgaatatgttttttgacaattaatgtaaacatttcaagtaggctgagattttattgcatattaacaatgtccatgttcactcgcggcagccgcccccttctgcgcggtcatgccgagccagcacctgggcctggaactgggccgcagcccccagcttcacccaccacctccctaccatggacccctgcaaagtgaacgagcttcgggcctttgtgaaaatgtgtaagcaggatccgagcgttctgcacaccgaggaaatgcgcttcctgagagagtgggtggagagcatgggaggtaaagtaccacctgctactcagaaggctaaatcagaagaaaataccaaggaagaaaaacctgatagtaagaaggtggaggaagacttaaaggcagacgaaccatcaactgaggaaagtgatctagaaattgataaagaaggtgtgattgaaccagacactgatgctcctcaagaaatgggagatgaaaatgtggagataacggaggagatgatggatcaggcaaatgataaaaaagtggctgctattgaagtcctaaatgatggtgaactccagaaagccattgacttattcacagatgccatcaagctgaatcctcgcttggccattttgtatgcaaagagggccagtgtcttcgtcaaattacagaagccaaatgctgccatccaagactgtgacagagccattgaaataaatcctgattcagctcagccttacaagtggcgggggaaagcacacagacttctaggccactgggaagaagcagcccatgatcttgcctttgcctgtaaattggattatgatgaagatgctagtgcaatgctgaaagaagttcaacctagggcacagaaaattgcagaacattggagaaagtatgagcgaaaacatgaagagcgagagatcaaagaaagaatagaacgagttaagaaggctcaagaagagcaggagagagcccagagggaggaagaagccagacgacagtcaggagctcactatggcccttttccaggtggctttcctgggggaatgcctggtaattttcccggaggaatgcctggaatgggaggggacatgcctggaatggccggaatgcctggactcaatgaaattcttagtgatccagaggctcttgcagccatgcaggatccagaagttatggtggccttccaggatgtggctcagaacccagcaaatatgtcaaaataccagagcaacccaaaggttatgaatctcatcagtaaattgtcagccaaatttggaggtcaagcataatgcccttctgataaataaagccctgctgaaggaaaagcaacctagatcaccttatggatgtcgcaataatacaaaccaacgtacctctgaccttctcatcaagagagctggggtgctttgaagataatccctacccctctcccccaaatgcagctgaagcattttacagtggtttgccattagggtattcattcagataatgttttcctactaggaattacaaactttaaacactttttaaatcttcaaatatttaaaacaaatttaaagggtctgttaattcttatatttttctttactaatcattgtggatttttccttaaattattgggcagggaatatacttatttatggaagattactgctctaatttgagtgaaataaaagttattagtgcgaggcaaacataaaaaaaaaaagtccatgttcatctctaaatgacatcattgttccaaagcttttccattcttcttaaccttccacctgtcaatctataggagatgacttctcctacttcactcatgcattgactccttcaatcaataaaagtgactaagaacctgctacaggtgaggtgctgtgtttggtgttaaagtgacaacagttatctgtcaataagcctgacaaggttcctatccctgtgttttgtgcactctgggtcaaactcagaaatgcaaacaggtggagagcgatgagttctatgactggtaaagaaaagggcctgctggtttccctcaggatctctgtccttcatctcaaaatgcatcttccttgttatcgttcctctccttcctgtctcagaggaagacctgctcctgctacactctgggcaaccttgtccccgtggccctgtggccccttggttgttgaagtctatgttatgccctatcttttaccctcagtcactctctctgttaacattctccctgtgccctgtaaccctccctcatctttaaataaatcctcctcctttgaccttcgcatgtattcagtcatgcaactcaacaagcatttattgcacagtgatattcaatttgccacttgctaaaagtctgaaccttggcagctgaatgtgatcagaaaaaaagcacgactgctatgactagtctcactttaaattcatggtcgttgaccaagagctaccatacaatccactacctttctcaagttcagtcacattcttcctttcctagatgtctgctttctacttctcttctcttctgaaacttcccacaactcctcgttcattctcttctcagttgacaactttgcttcctatttcactgaaaaatagaagcaatcagatatgaacttctggctgggcatggtagctcatgcctataatctcagcactttgggaggccaaggcaggaggactgcaggttaggaatttgagaccagcctgggcaacatggtgaaactcccactgtactaaaaattttaaaaattactcaaacatattggcaaacaactgyagtcccagctacttgggaggttgagatgcaaggatcacttaaacctgggaggctgaggctgcagtgagccatgattgcaccactgcactccagctcaggcaacagagcaagaccctgtcttgagaggagaggagaagagaggaggggagaggagggcaggggaggggaggggaggggaagggagaggggaggggagaggggaggagagaggggaggggaggggaggggaggggaggggaggagaggaggatcaggtgaggagtatgccaaggagtgtttttaagacttactgttttctctttcccaacaagattgtcatttcctttaaaaagtagttatcctgaggcctatattcatagcattctgaaagaaagaaaagaaaagaggaaagaaagagagaggaaggaaggaaggagaaagagagaggaaggaaggagaaagagagaggaaggaagggaggaagagaagaagggaggaagaaaagaaggaaggaaggagggagggagggaagggagggagggaaagaggaagaaaggagggaaagaaggaaggaagagagagaggaaggaaggaggaagagagaagaaggaaggaggaagacagagagggagtaaggaaggaaggaaggagaaagagagaggaaggaagaaatgaaggaaggaaggaaagaaagaaaaaataaaagagtgaaaacggactggagaagaagaaaccacagttgctgctatatccaccagcctctctgcatgtcctggcctcagccctgctgggctctggtactgaccacttccttccttcctaatttcctaattgactaggccagctgagcagggcttttctgtgctgaggaggtaaatctctggatatctagactgaggggtggaaggagccttccagggcacacatgagacatggcaggggtaggctgctagttttattttgttttcttttagacacagggtcttgctctgttaaccaggctggagtgcagtggcgtgattatagctcactgcagccttgacctcctgggtctcccacaatccttccgcttcagcctcttgagtagctgggactgcaggtgcacactaccacacccggtccatttatttttatatttcgtagagacaagatcttacagttttgcacagagtgatcttaaactcttgaccccaagtgatcctcctgccttggcctccaaaagcattgggattataggagtgagccactgtgctggacctagtctgtcagctttgaagctttagatatgaactcagagggacttcatttcagaggcatctgccatgtggcccagcagagcccatcctgaggaaatgactggtagagtcaggagctggcttcaaagctgccctcacttcacaccttccagcagcccaggtgccgccatcacggggctcccactctcaactccgcagcctcagccccctcaatgctgaggagcagagctggtctcctgccctgacagctgccaggcacatcttgttccctcaggttgcacaactgggataaatgacccgggatgaagaaaccactggcatccaggaacttgtcttagaccgttttgtaggggaaatgacctgcagggactttccccagggaccacatccagcttttcttccctcccaagaaaccagcagggaaggctcagtataaatagcagccaccgctccctggcagrcagggacccgcagctcagctacagcacagatcaggtgaggagcacaccaaggagtgatttttaaaacttactctgttttctctttcccaacaagattatcatttcctttaaaaaaaatagttatcctggggcatacagccataccattctgaaggtgtcttatctcctctgatctagagaggtaagcagggtcgggcctggtagtacttggatgggagaacacctgggaataccaggtgctaaaggctttaagaataaaaaataatgatcctgctttgtgtttatcccatgttgagttctgtgcggggcagagggaacacacggtaaatgcgttatggggaattataggctacttgagggagtgacagtctggtggtaactcctgccttcctccatcagtgccacattggcatcctcttatgcagtcaggcttcagggctgatgggttcagaaccgagggcttctggctctgagtgaggtcctgctgcaaggtttcctagatgagccactgagactctaataagatccagtggaaataaccaggctctcgtcggaatataagtcccaagggaagctgtgccagtcttgtgggcgactgcctgacttctcctttcatttcagcaccatgaagcttctcacgggcctggttttctgctccttggtcctgagtgtcagcagccgaagcttcttttcgttccttggcgaggcttttgatggtaaggcttcagaaggtttgcaggatttctgaagagaaacatcgccctggacctgataaactggggaaaatgatgctttcggaaggctgcttttgaaccacagagttgctagtgtctgcgttgctgaggcctgccaggaactagggtttgctgggttgcctgtctcgagtctttcagagctgctgggaatatcccctttccccgtagtgcagcttctcaggatgtgttaagtggatggatcacatttcagaagccgctgcaaggtgtatcaaaaacacatctcctgagccgtaagggacggggcatccagtaacaacgcacacggggtatttttgggcttccttaagatttgagccgctgccttaggttgtgctgcccaatgtgcctggggagctgctaaacagattagagagtcgaggattgttgtcagttactcagagaaagaacaatcatcctttccaggagcacctgagctgtttgttttgmgtagaagatgcaaaataaggcctgcaatgggtataaaatgtccctcagcataaatcgcataggagtatgactaaggctgttgactcttctgtcttctttctccttcctccttcgatttcctagttggataatgtacagggctctttagcctcgctctgtcaggggctcccttcctggtttgttctgtttccattcttccttctccagccttcttgacaagagctgggaactaacgtgcctcaagcccccacaaggaccacagcattttctcatytagtttcagaatgactctgtgacgcaatcttcctctcttggaaggtgagaaagctgatcttggaaggtgagaaagctgagacttagagcagctgaagccaatgcccagggacttactgccagtcagcaggtggcagggcagaggtttgagcccggctgtgcttgaggtcagggctcttgccaggtagacgcatcactgaccacctcctagaggttgatggttatgaatctcaggcacaccttggcatcacctgaaatacccatgccttcaactccccagcagagtctgcagaaactggcctggggtgtggcctgggcactgggactttcagtttctctctgggtgattagaaagtgcagccaaggctcacgcctgtaattccagcactttgggaggccaaggtggatgaatcacttgaggtcatgagttccggagcagcctggccaacatggtgaaaccccgtctctactaaaaatactaaaatgtagccaggcgtggtggcaggcacctgtaatcccagctactcaggaggctgaagcacgagaatcacttgaacccgagaagcagaggttgcagtgactagagatcgcaccagtgtcctccaacctgggtgacagagcgagactccatctaaaaaaaatgaaaaagaaagtgcagccaaggcagagcaccactgccctattgcttcctcaagcaacccacagcatcagtacagcctactaagaaagtatttagggacttttatgctcctaacagtcactggaactcacgtcacaatgacgtgtattccatttgcaagaatatatactttaggtcggggtgcggtggctcacgcctgtaatcccagcactttgggaggccaaggcagggggatcacgaggtcaggagttcgagaccagcctgaccaacatggtgaaatccccgtctctactaaaaatacaaaaattagccaggcgtgatggcgcatgcctgtaatctcagctactcaggaggctgaggcagaagaatctcttgaacctgggaggtggaggttgcgatgagctgagatagcaccactgcactccagcctgggcgacagaactttagtagtcagggcagaagtactctgtgtctgccacctttctcagcatcagtattccatgtcactacctcattcatacacactcctggatcttatcataggcagcttcattctatagcagtggctcttcaccagggcacttgaagaagccaactaggataaaggaatgtgcttctcaacccatggtatccaaggctgctatgatcacaggctgawagcttgaagtcagtggaagatttgtccttcytcattcccctctaaggtgktgttggagtctttatgttctcctgatgtcccttctgcctttcctttccttkccaggggctcgggacatgtggagagcctactctgacatgagagaagccaattacatcggctcagacaaatacttccatgctcgggggaactatgatgctgccaaaaggggacctgggggtgyctgggcygcagaagrgatcasgtaactggagctcctgggacrtyagrgctgggtgagcagagcttgcctgccttggacagtcaggagggagacgagctccttgtrgagaagttagaggctgcggcccctcctcytcttgccctctctctgcctctgtgctcagtgtgaggtctgagtggatggtaggagtgagtgattcctcatcctcccyctctgggtgctgttcatccagcctaggggtgcccagcctggctgaatggggtggtgcccagtgttttcatccctccttccttggcctttctgggctcctctctgagccctcccttggaacagggagaatgggagggtgggctattgctcactggcctgattattaatctccttcttgcctgccttgattacagcgatgccagagagaatatccagagattctttggccatgrtgcggaggantcgctggcngatcaggctgccaatraatggggcaggagtggcaaagaccccaatcacttccgacctgctggcctgcctgaganatactgagcttcctcttcactctgctctcaggagatctggctgtgaggccctcagggcagggatacaaagcggggagagggtacacaatgggtatctaataaatacttaagaggtggaatttgtggaaactgtgtgttatactttgtggtatagactgcctgtttagtatgaaggggcgatccatgcacatctaagtgaacgtggaggctgggtgggtgggagacgactcctgggcacacagggcatcctgggcatccctgaggcaaggacatgatgagttcagtggccacccccacaggatcccaggggcttcagcagatcccaccccttaccccatgtgagcagctgcccagtgagtctgtaggaacccgagccacattcccagtgagttcaactgcaccccggcacgttttgctagcacctcaatggagagctccttgcttgcagcttaggcttgtggcacccagcaaaagcttcctgccacccagtggctacagccacacactctccagcaagatttaatctcagccttgtgaggagccctttcccaaatttatttctttctgtgttttttatcccttagtagctaatctcatgttagccattaataactctctatgttaaacccttccttttgtatctgcggctacattgatcaattgtctcacaccgctcacccaccccctctccctggtcatgcagaggcctcaccagtcattttattgctattcccaggcctctgtgtgcccagatctcttcactgccctgtcagttgtgtcctgtccccttctcgacctcctggccttgtcctcaatgatgtttctatgaggctttggaaagcctcatcccaagagtcctggcaactgatacattagtctcaccaacactagcccctactcctgatctcattttaaaattttattttcttattttattattattatttttagggacatcaccctgcttctgactgacccaatttttaaagtttctctttattctccttaaagaatggctctcccatttgtttccctcatctttcttttcactgacttagaattcaggtccagacaaaaattccacttccttgaagagccttcccagtagccatgaaccacactctggggcagagtttgtggctcccaagcactttgttcacacctgctcgttcatctttaccccctcctctcagaattggttttgtatgtcagttcccctgctggactggaagcccctgtaacataactagcatttgaacagttcataaaaacactttcatttctattgtcctgtgtaactgttcacaagatacattagtctcactcattgtcgtttgacaatgtttattgttctaaagagaaagcgagatatgtaggtagacacaacacaataagagcctcaatacaggcacacactggtggcagtccaaactctgctggaatatggaaggccagtgaatagtaactagaatcgctgccatcttttacactgcaattgcaagactgtgtcctatactttacatgctttatcggattgacactgcagagaagcctttgatgttctcggttggataaacaggtttagaggtatgtgttcaggccttctccaaggtcacacatgtaacaggtgcagagccaagactgcaggctggtttgtctgactccagaacctgtgatacactgaacaaggccaagagattcagcagtggagacctcctctcttcttcaggaagatagggaacatggtaagagcagtgaattccataagcatgggaccccgttatacttcattttttgtaaaattagttccttgatcagaagcaacgcctttgggtctctcgctattgagttaagtgtggatgtgccactctccctagtaccccagagtgtagttggaggcttgcctagagattagaggttgaggatccttcagtagttcctataccaagccataagttgtgctgcatctgcaggtagggtcagggagctccgctgaacagatgtggargacatcagagtgggaggaaaaggaagcaagtcgtgtggggagagaagacccagcctgcaatgatgactggttaactactgtttcttacctaatacacactcaacttagataacagactaagtctaggtgataaagcctcaaagaatagcagactctccccactgcacccgcttcccacctccgccacctttccacaattcttagcatgggttctcctgaaaagaaagcggaaacaaagtcttgtgtgtaggtattttatttggggaatgaacacggggagcaggagtgagacagtggagtaaaacagggaggagcaaggccaatacagggacacattatacagctggccatgcataagagccacataactgatgccactgggaccttcagaggaacatcataaaaagtgtctcagtgctctccatcagcagtccaaaatgaaaggcacctagcaactggcttccatctccctttggtcaaaggtggccccaccattgttaacttttctgcatttgttggctatgcacacaagagtgtccagtgggtttacctggagtaggaagtagaaggtccacggagcagacccaaagcaaggtgctgccaggttgtacctgtgtgaaatgaattaaagcctatggtggaacccatcactgtagcagtggctggagaaaggggagtgggccagcaggtctgaagtagttgacaggctgcatctgatacacagtgcaaagctttgctttttgaaagtaaggtctggacacagcaagttcacttgggaacaaaggaatggactggatcttagactaagaataaaagagacaagaagaaactatactgggtagccaagatggggaaagaggcagggcgactgggagagacagagaaatgtaaaccaccatggactaatgaaacctgccataacccttgtgatcccacacagatgccactcccagggggaacatgatttggagcacagtgctccacaagacactgaaggaatttagggatgctatggggctttaataggtttagggacatggtgacattcctagcaacaagattgtaacacactacataatcttttgcttgaaataacttgtttttgttttcttacaatataggtactttgttagaggctgcggtaaaatgagggtaatatgatggcctttatggttaggggatacaaggaatatatgaatcttatgcccaatcaaacccacaaggtccccaatggagataagttctgaggacaatgaccagcactctattgttggttggggtttggccccaaacttcaaagcagaactctggtaagttgggctgcactgcatggtctgggatagaagtctaagaggacttctttcaaaatcagtctccaacccctcagatcagaaaggccattccagtcagcccccaccagcactggagggagcgaaccagggagcatgagcttgtgtttgactcactcagagccaagttcctattgcacacctcataggctttttccaaattagaaaaggacagaaggacctgtgagacctgctctccttcacttcctttagtagggtaaggctaacttgcttcaacaaagatactccaaaatacagaatgttaaggaatatacaaatttatgtctcacctaacagtttgtgatgagtatttcagctgccagggacttcagctccgtactgtctttcaggttccttccaagttgttggctctaccatacttcagactgacccttgctactcaaagtgtgatccaaggaccagaggcatcagcatcgcctgggatcttgtcagaaatgcaaaatctcaggctctaccctagatctactgtggcagtcaggagctcctacctaatctgtaggaactacagcaaaaaataaaaataaaaaataagtagggacttgttgagaagccaaaacaggggaaaaaaatgtgggaacccttgtccatcaattattaagaatttcaaaacagtgaaagcagaacattaaaccaagtggggggccctcataagctcagggttctgacaattatacagccctcacgtccatgtgaggtggacagaatcctaaggaaatttcagcaggtgggcaatgggtgaaaagccacgccagagttgaacaggaacatatgcaaaaagagcaaagtgcagaacgtatgcaaggaacggaggacccaggacaagggacaaacttgggctctgaaacagaaaaagtttgaaaatagatcacggaaggccttaaatgccaagcccaagggcttgggctgtactctgaaaacagaggggaggcgttgaaagtttctgactgggaagtggcatgactgtgccccaagaagacaaagatcctggcagtgcatctgcaattaacttcccatgaaagcaagataaacaatctttctcacggactgtgatgcatctatacacgaggatgactctatctaaatctcagaacagtgtgggggtcgatggcaagttgagggaggttaaattagtccattgagcccgggcacagtggctcacgcctgtaatcccagcacgtcaggaggcccaggcaagcagattaattgaggtcaggagttggagaccagcctggccaacataatgaaaccccacatttactaaaaatacaaaaattagccaggcgtggtggtgcacacctgtaatcccagctactcggtaggctgaggcaggagaatcgcttgaaaccaggaggttgcagtgagctgagatcgtgtcattgcactccagcctgggtgacagagcgagactccgtctcaaaaataaaaataaattagtcccttgatctatagttttcaggtttggggcagggtctctaccaattgtatttttttttttttttttgagacagannnnnnnnnnnnnnnnnnnnnnnnnncctcccgggttcaagcgattctcatgtctcagcctcctgagtagctgggactaccggtgtgtgccaccatgcccagctaatttttttttttaacagtctcgctgtgtggcccaggctggagagcagtggtgcaatctcagctcactgcaacctccacctcccaggttcaagcgattctcctgcctcagcctcccaagtagcgggactacaggaacccaccaccatgcccagctaaatttttattgtattttagtagagacagggtttcactatgttggccaggctggtcttgaactcctgacctcaggtgatccgcccaccttggcctcccaaagtgctgggattacaagtgtgagccaccatgcctggccagcaattgtatttttaacaagctcctgcggtgattctgatatggagccaggtttgtgaatcacctgactgggtaatagtgtgtccggaattggtgggttcttggtctcactgacttcaagaatgaagccacagaccctctcggtgagtgtttaagtgttacagttcttaaaggtggggtgtccggaatgttacttctggtgttcggagtttcttttctggtgggttcgtggtctccctggctcaggagtgaagctatggaccttcgtggtgagtgttacagctcttaaggtggagcgtctggagttgtctgtccctcccggtgggttcatggtctcactggcttcaggagtgaactgcagaccttcgcagtgagtgttacagctcataaaggcagtgtggacccaaaaagtgagcagcagcaagatttattgcaaagagcaaaagaacaaagcttccacagtgtggaaggggacctgagcaggttgccaccccagttcaggcagcctgcttttattctcttatctggccccacccacatcctgctgattggtccattttacagagagctgattggtccgttttgacagggtgctgattggtgcatttacaatccctgagctagacacaaaagttctccacatccccactagattagctagacacagaatgctgactggtgtatttacagtcccttagctagacataaaggttctccaagtccccaccagagtagctagatacagtgtcgattggtgcattcacaaaccctgagctagacacagggtgctgattggtgtgtttacaaaccttgagctagatacagagtgccgattggtgtatttaca

SEQ ID NO: 8688 - DNA, 16859 bp, Homo sapiens
ttgctctcttcttctccagagagcctgccattgagactgctgtgtcttcctggcacagttgacacttttcataggctcagctgccaaattttctgggtgtggccattgtcttcaggtatcaagcagtggagatataggggatcccactttcactttattggacaagccttcaaatataccatctccacagtaacaattcattgtatttttaggagcaacacattttcctaatcatgtttacacatattatctcattaaatcacaatgtcctcatgaagtcatgaaggcttctttttttttttttttttttttttttgagacagggtctcactctgttgcccaggctggagtgcagtagtgtgatcatggctcactgcagccttgatctccctgggcttaggtgactcttccacctcagcctcctgagcacctgggactacaggtaagtgccaccatgcccagctaattttttgtattttttgttgagacagagtttcaccatattggccaggttggtctcaaactcctgggcttaagcaatcctcccaccttggcctcccaaagtgctggaattacaggtgtgagccactgcgcccaaccctcatgaaagctttattcccattttacacacgaagatcctaatgccttgtcaaaatgtgaccagccacactaacatcacctgggagcttgttagacgtgcagaatctcaaggctcagaactgctaagtcataatctgctgcttaacaggagtcccaggtgatttgggtacacattaaagtagcactggactaaaactcagaaaggtttagtggctttcccaggtttccagagcaatgtggtagcccagttgggacaaggctctggagactccaagaaatgcttttcttaatgcttcactcccggctggaaggcacacccattctttaaggccagctccctgatctcctccacattcttaccctgaagacccaggaagaatcaagagtcccttttgctcctgaagcccttcatgtattcctctgtcacagtaatgaatgcatttggccttgtaacaagatggagaagaaaagagggaataaaacagtatttcacaaacccctcttctatgcagaggaacagggtaaatattatcaggagtgaagaagagaagtatcttgacattctacgtttacccttaacttgggagcatttttcctgggcagaggcgaactcttcctagtttccccttaagagtttttcatgtggcccaggtactgaacataagatagacttggagaggccattggttctggaggcctcacactactttggcctcatattttttttttctccccaacttcataatgataaactcaggcttcctttgtgtaccacttttggcaatgcaggtgctttttgcaagtcaatgggagagaattacaagtgtggcttattaaattgatctccaatttaatcaataaatcattcacaacatgaaaatgtgtttgctttgaattagtgcttgatagcaattttctatttcctaaaaacttgtaattgaaatgacagcgtgcctttattaaagagaattttaagaataaaaagaaataacctaatataagattgttttaatttctgcctatttcattctggatgtacccacactcatccatgcttcgcaaagagacagtcatagtatacatgccaccttaatcataaagatttctctgggtttctacatggttttcacagtgatactttttcctttcattattcatcattcttcagagaaccatcacctcctgggactcctgtgatgaaagtgccatgattgctaagctccttaagtgaggaaatcataaatttcatttttttatcccttctaatggcaaaagcagttctgagaatatgctaggcacttcagtgcttgtagccttggaaaaaggtggtgagcatgtttgtagaagataaattctgggaataaagcaccaccaaaaggctaagagatttagccgggcatggtggcatgcacctgtagtcccagccaatctggaggctgaggcaggagagtctcttgaacctgggaggtggaggctgcagtgagttgagatcatgctgctacagtccagcctgggccacagaggaagactctgtctcaaaaaaaaaaaaaaaagaaaggccgggcacagtggttcatgcctgtaatcccagcactttgggaggctgaggcgggtggatcacctgaggtcatgagttagagaccagcctggccaacatggtaaaaccccgtttctactaaaaataccaaaaattagccaggtgtagtggcgggcgcctataatcccagctactagggaggctgagacaggagaatcacttgaacccaggaggcagaggttgcagtgagctaagattgcaccattgtactccagcctgggcaacaagagcaaaactccgtctcaaacaaaacaaaacaaaccactaagagatctaatcaattattctggcacacaaggtaatatgaatttcctgaaaatgcaactaaaaatacgttattaaccacatttctccatattcaacccttcaaatcaaaattatgatgatacctttttttgtattctgacaattgtcatgattactcttatgaaggaaataaatagtagtaaaaaagaaaatctgtttcttgttactcttttttgtaatccatatgggaaattaaattatatagacagcaaaactggctttactattaataacacacgagcttttcttaaactctggctttgtctaacacttttcgttaagcaaatgcatttttaccctacaaatcactgagggactgacatatagttgaaaactatagaaaatacagaaagacttcctctagtcttatccacaactcttcataatgttattgcacgagaattttgaatgtggtgcagtaagaaaagcaccctcagctgtgcctcggaagacctgagttctggctctggctctaccaccaaattactgtgtgattttgggtgagccactttgcctctctggacttaaatattactactttgaaagaaagagagggagagagacatcagctgtatgacctgaggccattttctgccctaatactctatgacaaatatctgtgatagtagtaatttctacatttacacttagggtttatttaaatacagttttttctttctctttattttggaggaaaggaggtcaaatatgctgctagtctctttttccctctgaagtgaaatacagtcttttgaacctttggagggacccagtggaattgaatttagatgggatgtccccaatggatctgatccagcattttcagaacccattgaatgtgcagcagaaggtagacttggagaggccattggctctggaggggtcacactactttggttttgtagtttggtttctgctgccttcccatagaatgcctgaatccctgatgtaggcccaaaggtgaggaaccaaggcttgtcagttaactatgtcacagtttgtctgtcttccgagtcaggatgttgtgggttgaataatggtcaaccaaagagatgaagtcttaattcctagaacttgtaaatgttactttacttgggagaagagcttctgcagatgtgattaagtcaaggattttgagatggggagattatcatggattacctggacggatcctaaatccaatcatgagtgttctcataaatcagaggtgggtgagatctgatgcagacacacagtggagaaggagatgtgaagatggtggagattaaagtgatgtggccacaagccccaggtttgctggggcagccaccaagagccagaagtggcaaggaacaattcgcccttcaagcacccagaaggaggcagccctgctggattatagccatctggcctccagaactgggggagaatacacgtctgctgctctaagccactaagttggtggtaatttgttacagcagccacaggaaacaaatacacaggtgacagcaggcaagtgtccagtcctgcaggggcccacaccagccctcagatctggctcgggaaacacaaaaagaggagcatccttccattctggctgttcagtcctttcctccaactcttcaccagactccacatctccaccttgcctcattctctctgttcaactatttattaagaagttgctgtgcactaagcactgtgccaagtatggaggagcagctgataaaagaatcctcaggaactgaagatagagactgtttggggtttagatcagcttgcactagaaactgggcttggggggaattccaccttagtccctcaggccttgcttaactgggctttggaggggaaggtggcttcccccacacctgccctcactgatgaggcggtcccatagttcccaccatcatgacatggactagtaatacctgagggccctgagttctccatcggctcaccattgatctttgcttatcacatacaaaactctcataaaggaactgggttttccccaaactgcgtcaaaacatgaatgatggtgaggggaatttgccgaggtatgaattcaggtaccagcagatatttccttttattttttctttagagacaggtcagtggctcaatcatagctcacctcaaactgctggactcaagtgatcctcccactttagcttcccaagtagctgggactacaagtgcatgccaccatgcctggctaattttatttaaaaaatttgtacagatgatgcattagtccgttgtcacactgctataaagaaagaccaagattggataatttataaaggaaagaggttaaattgactcacagttctgcattgctggggaggcctcaagaaacttataatcatggtggaaggcaaaggagaagcaggcacatttttcacaggtcggcaggatggagtgagtgcaagcagggaaaatgccaggtgtttataaaaccatcagatcagatctcttgagactcactcactatcatgagaacagcatgggggaaactgcccccatgatccaattaactccacctggtcccgcccttgacacatggggattatgaggattataattcaagatgagatttgggtagggacacagagccaaaccgtatgagatggggtcttgctatgttgaccagtctggtcttgaactcctaggctcaagcaatcctcctgcctcagcctcccaaaatgctggaattacagatgtgagccaccgtacctggcatccagcagatatttctactgcatttctccaggaatgagtgggttggagatgaggagattctggaacttctgtcatttcctcccaacaattctgggactcatgttcactctcctgggataggggaaactgacttaaagtgattttcaaatggcattcctgttgaaagagttaatatatgtacatgcatacaacatacacacacatttgtgtatgctacataccatggaggaaagccagtcctggtataaattgtataacttcaaaataataatggaattatgatttcattttaatactgatttcaattaaaaattttaatagactattttttagaggttttaagtttacagaaaatctaggtagacaacacagaaaattcccattaacccctgtattagtctgctaggacttccataacaaaatactacaggctgagtagcttaaacaacagaaatttgttttcccacagttctggaggctagaagaccaaggtgcccacaagtctggtttctggtgatgcctatttaccttacttgcagatggctgccttctccctgtgtcctcacatggcctttcctctgagcacctggaggcaagagagtgagctctggtgtgtattcctctacctaggagacaccagtcctattgaattagggcctcagccttacgatctcatttaaccctcattgcctccctttaggtgactaggtgtgagggtggagccctcaagagactgccttctctccatctgctgtttgtagtgggaggatacctccagagaggctgctgctcattgagctgcactcacatgaggatacagactttgtgaagaaggaattggcaacactgaaacctccagaacaaaggctgtcactaaggtatgtgctacaagcatccttggggaagaagggcatgagtaggcaggggcatttttatatctttagaggataggcaaagggaagaccaaaatttcagaggtctagcacaagaagtaaaatttttttttaaatctttgcatttcctcagagcccacaaacatgcatgtgtcttagtggctgcccatgctctgrctgaggagagcaaaccgtgccatattctctgcaggcctttaggagagagtgaaaactcctacaagagtgggaaggtagataagagaagatcctttataataccaggcatctgggaagatctgtccttgtgctgggtacagggcttctatcaggtaactgaaggacacctgggtgctgttcttaaggaaagaagccagcgagcaaactttcatatgactaaagaagttgctggtgggtgcctgtagtcccagctactcaagagcctggggcagaaggattgcttgcgcccagaagtcagggctttgtgtgagatcacacctgcgtataactactgtactccagcttgggcaacatagtgagaccctgtctctaaaaaaataaataaattgcttgcttgcttgcttgtgctttcaaatcatagaaaagtagcagagtggagaggggtgtctgaatgtaaagcaaacaaatgccttggaaaaatatgtctggattgaaattgcattgaatgtatatatcaatttgagaagaattgtcaagttttataatttttatgtaactgaattgcatttttattagttttattcctagtaatgctagtaattttcattgctagtataattgggatcatttttctattgcatttataaagttattttttttctggtgcttaggaaagcaattaaaagaataaactgatgaatatcatgcagatatatctctaaaacaataagcaaaatacaaagggaaaaacaatatatcatttatgtaagttaaaacaatayatcatttatgtaagttaaaacacacaaaaatatatattgtttatggatatatataaatatgtaaaagtacagggggaaattgtttggaatgatacataccaaattggttttagttgttgtttctgttatggggataagttgtgtagttaaagggaacattagcttcatctctattgcatcagaaataaaaaaagaaagagggatggaaggaagagagggaatgagggagggagaaaagaagggagaaaaaaagaaggaaggaaggaaaaaaaaataacccaaagcattgtgagaatatgttagcagctgctaattctaggtgatggaactatgggtatttacattttctttgtaagttttggcttttctcatctcagctgactccctttggtttacataacaaaatacaatagactgagtggcttaaacaacagaaagtgttgtttaacatacttctaaaggctggaagtccaagaccaagctgccaatgcagttgatttctggtgaggcttctctacctggcttgctgatttcagccttcttgctgtgtcctcacatggtctttactccatgcacaaggggagcaaaatttcttgtgtctctttctcttctgttaaggacactagttctatcagattagggccctgccttttttggttttgtttctgttttcttttttttgagacagagtctcactctgtcacccaggctggagtacagtggcttgatctcgastcattgcaacccctgcttcctgggttcaagaaattgtcgtgcctcagcctcccgaggtagcttggattacaggcatgtggcaccatgcctggctaatttttgtaattttagtagagacggggttttgcactgttggccaggcttgtctcgaactcctggcctcaagcaatccgcctaccttggcctcccaaagtgctgggattacaggtgtgagtcactgtgagagccagggccctgcctttataacctcatttaaccttttttttttttttttaattttaatttttttttttttttttgagacagaatctcactctgtcgcccaggatggagtgcagtggtgtgatctcggctcacagcaacctccacctcttcggttcaagtgattcttctgcctcagcctcctgagtagctaggattacaggcatgcacccgccatgcccggctaatttttgtatttttagtagagacggggtttcgccatgttggcaaggctggtcttgaacccctgacctcaggtgatctgcccaccttggcctcccaaagtgctaggattacaggcatgagccacagctcccggtctatcatttaaccttaattacatctttaaaggcccaaatagtctcacccactccaaatagtcacacccacaccggaggttgagcacttcaacacatgaatttggggaggacacagttcagtccataacatccccctaatttttaaaaaataaaaatgtttttaaggagtgaatgtcttttatgtgtctctgtgaccaggtcccgctgccttgatggattatacacttgacctcagtgtgacaacagtgaccgactactactaccctgatatcttctcaagcccctgtgatgsggaacttattcagacaaatggcaagttgctccttgctgtcttttattgcctcctgtttgtattcagtcttctgggaaacagcctggtcatcctggtccttgtggtctgcaagaagctgaggagcatcacagatgtatacctcttgaacctggccctgtctgacctgctttttgtcttctccttcccctttcagacctactatctgctggaccagtgggtgtttgggactgtaatgtgcaaagtggtgtctggcttttattacattggcttctacagcagcatgtttttcatcaccctcatgagtgtggacaggtacctggctgttgtccatgccgtgtatgccctaaaggtgaggacgatcaggatgggcacaacgctgtgcctggcagtatggctaaccgccattatggctaccatcccattgctagtgttttaccaagtggcctctgaagatggtgttctacagtgttattcattttacaatcaacagactttgaagtggaagatcttcaccaacttcaaaatgaacattttaggcttgttgatcccattcaccatctttatgttctgctacattaaaatcctgcaccagctgaagaggtgtcaaaaccacaacaagaccaaggccatcaggttggtgctcattgtggtcattgcatctttacttttctgggtcccattcaacgtggttcttttcctcacttccttgcacagtatgcacatcttggatggatgtagcataagccaacagctgacttatgccacccatgtcacagaaatcatttcctttactcactgctgtgtgaaccctgttatctatgcttttgttggggagaagttcaagaaacacctctcagaaatatttcagaaaagttgcagccaaatcttcaactacctaggaagacaaatgcctagggagagctgtgaaaagtcatcatcctgccagcagcactcctcccgttcctccagcgtagactacattttgtgaggatcaatgaagactaaatataaaaaacattttcttgaatggcatgctagtagcagtgagcaaaggtgtgggtgtgaaaggtttccaaaaaaagttcagcatgaaggatgccatatatgttgttgccaacacttggaacacaatgactaaagacatagttgtgcatgcctggcacaacatcaagcctgtgattgtgtttattgatgatgttgaacaagtggtaactttaaaggattctgtatgccaagtgaaaaaaaaagatgtctgacctccttacatatgcaaaaatataccttcagagactgtcagtaggctggaagaagtggatattgaagttttgacatcaatgatgaggctccagttgtctattcattgactgatggtgaaatggctggagtgattctgaatcaaggtgattgtgattatagtgacaatgaagatgatgctattaatactgcataaaaagtgcctgtagatgacatggtgaaaatatttgacaggcttatggaaggactacagcagcaygcattcataacagaacaagaaattatgtcagcttataaaatcaaacagagacttctagacaaaaaccattgttgatgaggcagatgcctctagaagagacgtttaaaagccatcaaacacaatgcctcatcttccctgraggacccacttcytgatccctcaactgtgtctgatgtttcttctcatgtaagaaataaaaaataaaaataaaawaawatatattggtatgtaactacaggaaaaaaataaaaaatatatagtggacagtaacctttcaatcaaaactcagtatcataagtagagactgaaaacttgccgttattgattgttgttattaacagctgatacaggtattctgctgatgctactgctgcctagttaccatgaacacgttttttcactattaatggtgcgtcatattttttacttttaagtacttacgtgtgagtaagtgtaagaaaatgattgcttatcagtagtatcaatgatttactcaatatctgaatcaccttgattcagaaccatttcagctgtttcaccatcagtcaatgaataacagcctcattgatgtcaaaaacttcaatatccacttctttcagcctactgtagactctggaagtatactttttgcatatgtaaggaagtcagacttttttttttcacttgacatacagaatccttcaaagttacccctagttcaacatcatcagtagacaaaatcacggggcagaggttgtgccaggcatgcacaactatgtctttagtcgttgtgttccaagtgttggcaacaagatatatggcatatttcagataagttcagagtcaggaaagatgatggtgccaaacaaccacaagctgggcacggtagctcacccctgtaatcccagcactttgggagactgaggcgggcagatcacttgaggtcaggagttcaagaccagcctggccaatatggtgaaattccatctctactaaaaatacaaaaattaacctttctgcctgtaaatgccattgaagaagcaccgttagattctctcttctcactgccgtcctgtctaagtcagagtctcctaaaaagcctgaacagctgaggaagctcttcattggagtgttgacctttgaaacaactgatgagagcctgaggagccattttgagcaatggggaacgctcacgaactgcatgggtaatgagagatccaaacaccaagcgctccaggggctttgggtttgtgacatatgccactgtggaggaggtggatgcagccatgaatgcaaggccatgcaaggtggatggaagaactgtggaaccaaagagagacatctcaagagaagattctcgaagaccaggtgctcacttaactgtgaaaaagatatttgttggtggcgttaaagaagacactgaagaacatcacctaaaagattattttgaacagtaagggaaaattgaagtgattgaaatcatgactgactgaggcagtggcaaaaaaaagggctttgcctttgtaacctttgacaaccatgactccgtggataagactgtcattcagaaataccgtactgtgagtggccacaactgtgaagctaggaaagctctgtgaaagcaagagatggctcgtgcttcaaccagccaaagaggtcgaagtggttctggaaactttggtggtggtcgtggaggtggttttgatgggaatgacaactttggtggtggaggaaacttcagtggtcgtggtggctttggtggcagccatggtggtggtggatatggtggcaggggggatggctataatggatgtggtaatgatggaagcagttttggaggtggtggaagctacaatgattttgtcaattacaacaatcagtcttcacattttgggcccatgaagggaggaaactttggaggcagaagctctggtccctatggtggcggaggccaatactttaccaaaccatgaaaccaaggtggctatggcagttccagtagcagcagtagctatagcagtggcagaagattttaattaggaaacaaagcttagcaggagaggagagccagagaagtgacagggaagctacaggttacaacagatttgtgaactcaacaaagcatagtggtggcagggcttagctgctacaaagaagacatgttttagacaaatacttatgtgtatgagcaaaaatcttgaggactgtatttgtgactaattgtataacggttattttagtttctgttctgtggaaagtgtaaagcattccaacaaagggtcttaatgtagattttttttttttgcacccatgctgttgattgctaaatgtaatagtctgatcatgatgctgaataaatgtcttttcttttctaatgtgctgtgtaaggttagtctactctgaagccgtcttggtaaatttcccccagcagtgtgaagttagaattctttcaggctgatgcaaggttctatttggaatttatatacaaactgcttgggtggagaagacattgtcttcagaaaccttggtgtagttgaactgatggttattgttgtgacctgaagttcaccactgaaagagattacccaagcaaaatcatgtaattattggttataaatatgattgttggcacatcctatgcaatatatctaaattgaataatggcaccaggtaaaattatagatgggaatgaagcttgtgtatcatccattatcatgtgtaattaataaatgatttaattgtcttaaaaaataaaaatacaaaaattagccaggtgtggtggcttgtgcctatagtcctggctacttgggaggctgaggcaggagaatcacttaaacctgggaggcagaggttgccctgagcagagatcacgcccctgctcttcagcttgggcaacagaatgagactcagtctcaataaataagttaaattaaatttataaaactactgtgatggttaatacggagtgtcaacttgattggattgaaggacacaaagtatcgatcctgggtgtgtctgtgagggtgttgccaaaagatattaacatttgagtcagtgggctgggaaaggcagacccacccttaacctgggtgggcaccatctaacagctgccagcatggctagaatataagcaggcagaaaaatgtgaaaagagagactggcctagcctcccaaactacatctttcttccgtgctggatgcctcctgcccttgaacatcagactcaagttcttcagttttggaactcagactggctctccttgctcctcagcctgcagatggcctactgtgggaccttgggatcatgtgagttaatacttaataaactcatatatatatatatatatatatatatatatatatatatatatattccattagttctgtccctctagaaaaccctgactaatacaactaccttcaggctatgtgtataaggtatatataaaacataaatgaattctgtgtttagacctgggtcccaaccccaaaatatctcattatgtatacacaaatattccaaaatctaaaaaacaaaacaaaacgaaacaaaacaaaaaaccaaaatctgaaacacttctgatcccaagcatttaggataagggatattcaacctgtaagttaaaatatttaactatgattggaagtttgtctatttttcattttaattatgtaaatttttgcagtatatatcttgaagctacgttattaggtgaatgcataaatagtattgttatgactttttattgaattgactcttttagcattatgaaatgcctctttctctccagtaatacttcttgtcttagtatctactatgcttagcattaatatagccacactggtttttcttttgattagtgtatatgttgtgtatttccatgttctttcactttaaaccaaacaactctcctatatttaaatattataatatattatatattaatattatattattatattttaatgttatttaaatattcttttgtaagcagaatttagtttgggctcttcttttctcacagagagagagaggattttattgccacaaagacaaaatcatttttaggtaaaatattctgtgggattccattatagagcatacaaagggttgatttcagatttcaaaataatttttatcttttattttctggtttaacaatgtaatttcaattacagaggacacactcttcaaggctaatggccttgaatccaatcattttgagaaaacatccaaatggctttttcttaaaatgttttaatatgtgcttatgatatttataccatccctcaaaaaagtgtaggcttctgaaaaacataaaaagttctcttttttcttctgctctagacataaattcacttaattctgaatattctgtgagctccattattatgttgagatcagcaataacaaaagacaaattcctcattcttaatttccagaatctgaaatacaagttgaaatctaaccccgtggcaatttcctgataatctgtgtttttgtacaacctttgtactcttttctgtcatctcagtggttaaggcctctgttttcttggaatacagtctgtatcagcaattccacattcatggattcaaccaaccactgaaaatattttttgtattttttattttttttaaaaatacaaagtcaaaaatatagtataatgactacttacatagcaaataccttgtattaggtaatgtaggtaatctagagataatttaaagtataaaggagtatgtgaaaatattaagccattttatattagagacttgaacatcctcctgtacttccgggggttctagaaccaattccccatggataccaagaagactgtaatttcttacattgatgtcggtaagcatacttagaaatggaagttctgattctaaatgtctaaggttacttcctagatcttttgaaggctgccatccttcagaaattggtatatttcttgaaatttttggactctggaggtctcttctcagggtgtaagtagctctgctatgggcatcttcccaagcacatcaagccagggtgcactcctattgaaccagctcttgagcttggtgggggaggtgggagagcaagaagggactccatgacccagcatatagaatttcacattcacataatattccaggggtattatgtccctgcacacattgccataactatctctaagcagtgcctacacttggagagagtttgttcattttaagcagaagccaaagagtaccaccttttgtatttttatttatttatttttaattgttttattttatttcattttttttgagacagggtctcattctgtcacctaccctggagagcagtggcaccatctcagctcaccccagcctcaacctcctaggctcaagtgatccgcccatctcagcctccagagtggctgggactacagccaagttccacaacacccagctaattattgtatttttgtagagacagagtctcctcatgttgcccaggctggtctcaaactcctgggctcaagtgatctgcacaccttggcctcccaaagtgctgggattacaagtgtgagccaccatgcctaggtgtcttgtatttttaaaatccagtataacaatctttgcctcttaattgtactgtttagtgcatttacatttaataaaattatataaagcaacagcacaaagaggggataaatggaggtgtaaacagagttaaacatttttatggttcttacattacttgacaaatatttaaatcctaacttaagattaatcacaataggttagagatgagtattgaaatttctaggataaccagtaaaaaaaaagtacaagtacatataaatacaaactaatggaagaaaaagaaattagaatgatagttgactaatataaaacaagccaaaaacaaaaacaaaacaaaacaaaacaaaacaaaacaaaaaaccaggaaatggggatagcaaatagaaaacaaaaagcaagatggtagaattaaactcaaccatatcagtaacaggtatcaacccaaagctctcatatcattgagttgctaggccaatcctgaaacctcctactgttagaatcctttgttttagatgaaggtaaaacttacataaaacttaccagttaatcattttaaagtgtatagttcaggagcttttagtacattcacaatgttgtgcagatatcaccactatctagttccagaacttcttcatcaccccaaatggaaatccattaagtggtcacactctattccttctccctccatcccactccaagcactaatctgctttctgtctctatggatttgactattctggatatttcatataaatggaatcatacaatatgggacctctagtgtctagctcttttcgtttagtcaaatgacactttttttgtgagcaaactgaaccttgacttttaactttggtagtaccaaatgaggtatgttggactaaccattctattgtggagagagaaaaagctggacaaaaattaaaaatatgtatgtatccaattacttgaaagttaatggataattataaaatcttggaaaagacataaatccagcatttgggtctgtttttcccctggagatattgccaatttcagacaaagcttctgcaagcctgagaatctcagtagcatttttgactgactcacaggggtaggag

SEQ ID NO: 8689 - DNA, 48264 bp, Homo sapiens
  misc_feature (1)...(48264): n = A,T,C or G, or insertion/deletion polymorphism (see Tables 1-2)
aaacaataatttttttaccacttcttagtctatttctgcagttttaatttttgcaacagagaatgtattgtatttctttttttttttttttctcttttgagacagagttgtgctctttgtcacgcaggctgacaaagagtagtgcagtgatgccatctcagctcactgcaacctccgcctcccaggttcaagctattctcctgcctcagcctcctgagtagctggcattacaggagtgtgccaccatgcccggctgagaatgtgtttcaatagatgtgtgtcttttttttttggagacagagtcttattctgtcacccaggccagagtgaagtggtgcaatcctggctcacagcaacctctgcctcccaggttcaagcaatccacctgccccagcctccccaataactgggattacaagcgtgcaccaccatgtgcagctagtttttgtatgttttagtagtatgtttttgtatgtttcaccatattggccagggtggtctcgaactcctgacctcaagtgatctgcccaccttagcctcccaaagtactgggattacaggtgtgagccaccgagtccagcctcaacagatgttttaattgaatagatgttaaaataattattaatgttcatgatgatttaacttcaaggatattccttaaaacgtgaacagaaagaacctcctcatgattttaacagtttctgatatttgctttttctgagagtttactctcttattttccatctagttcctaactcatctggaatttctgttgcataaggtatgaaacagaagctatctttccctgtgcactctccacggaggcgttcaggcactcctggctgacgcgtgctgcctgcctccttcacggcctacatccctacacacacagatgcctcttgtgggaccaggtgcagtgaggcctgctttctaacctggattccctcatccacaaggtatggttacgaccagagcttcctcctgagagcgcagggagcttgtgacacctcccagaaatgctcaggggacgctggccaccttgcagagaaacccctcctaacgggaagggaacatgggtacgcgaggctccggtactgaccgcggctgggcgacagcaggctacttggataggggacgctcactctcctcagctcatccagcttctcctgtagcttccgcacctggctgtcggagcggctgaccctctgccgcaggctcttcagctcgccgttcttcttctccacctgctcccgcaggcagcacacctggctcttgttctgccgggaggagaagcagtaggagtgcagtgagtcgatgagcttgcaggcccctgacgccgacaggatgacctcgttgatggacatggggctggcgtcgctgtgctcgctctgcacggcttccgtggctggctttggggtgacgtcggcaggaggggcagaggggctctgggaaggcttctgcggtgtygcggtaagtgatgagctgggagggctctgggccaggcccttgtcgggtcccaggctgctcccactgcagcttggttccacatctttcttcagcctcttgcggtcaatgggctctcgggggacagatggcctttctcgggtgtgcttrgaggagaaactgtacgaatgaagtgagccgataaatttgcacgccccagatcctgggggcgtaaagtcatccatagaaatgccactcttatctgtcacgcccccttcgatggaggaagtggcgctctcatcgccagcatctgtggcagacgcttctgcttttccctgactgcctgccaccatggtggccagtccatctcctggagtccgttccagagcttgctgggcctgctcctggctggcggcctcctgggccgccctgggtgtggcttcaccttgcagagcagcttgcttcaacctgcgggactcyggcttggccatcgggtttccactcgaggacggtgaccaacctgcagctcctctgcyggtggcggcactcgagtgtcccctcacaccccctgtggccttgctggcatcttttctccgggtgcggccatggcctccagcccccctcttcttctcggtcaggtggaagatggatggcacggccgtrggcttcagcaggcgatgctggtcctccagcctcttggagaagctgtctttggtgaaatgctcactacagagaaatgaatacttagtgggagtccagttatccctctgaacagcttttaaccattggattagacgttktgagtcctttrgggggaacctacaggacaaatgacaaaaagtaattagaaataattaaatgtctccccttaaaataatcaactgtaaaagcaaaacaagtatttttgcacgcaccctaagccgtattgacttcatccacttaaaaaaatacttcaaaaagatttaaagaacatcttctacctgcagttattactggagtagaaatctgaaagacccgttgtctacccatacagagcttatagtctgtagggcggatgggaaagaaggtaaccaactgctccccaggctgtggtaaatgcccaatggggacacaggatgctgacagacagtgccaggatggcctcaggacagcaggaaatagctcctagaagctgactgctaaccaaccctcccaacttgcctggaaggtaggactctgggtaccaaaaccagggccagcatccacagacactagggcgtgagaggtcaggactgcatggaggcagccctggctgtgcgcaagcagctgagaatctggagacctccagaagactccagagctacagttctgtgttcctgttgcatgcccacctccaggagtaaaaatgctccttttaaaagtcaaccagcccagggacagggcacaatggtgctcacctgcagttccagttacttgggagcctgaggcttgagggttctttgagcccagaaattcgaagttacagtgagctaagactgcaccactgctccccatcctggggaacagagtgaaacccggtcttctcccctcaaaaaaaatcaaccaactcagatgatccttgaggacattatactgaatgaaatagggcaggtgcmaaaaaacaaacactgcatgataccactcacatgaggtactcagagtaatcaaattcatagagacaggagaatgcgggttcccagagcctagggagaggaggactggggtattaatgtttaatgagtccagagattccgctttacaaaataaaaataattctggaggtggatggtagtgacagctgcacaacaacgtgaatgtatttgttgccatgaattgtacactgaaaaagcggtaggaaaggctgggagccgtggctcatgcctgtgatcccagctactctggaggctgagatgggaggaccacttgggtccaggaggctgaggctgcagtgagctacggtcataccattgcactccagcctgggtgacagagtgggactctgtctccaaaaaaagttaggatggtaaatttcatgttacatgtattataccataatttaaaaatggtgagaaaaaagcaaccagcgcaggaagatactgaataggatgtttagtcatttctttattacctaataaagatccttcataaccatttcttcattaaggcaaactctgtgtttaagaacataggcctgggccgggcggggtggcttatgcctgtaatcccagcactttgggaggccgaggcgggtggatcacttgaggtcaggactttgaggccagagttcgagaccagcctggccaatatggtgaaaccctgtctctactaaaaatacaaaaaaattagacaggcgtggtggcgcttgcctgtaatcccagctacttgggaggctgaagcaggagaatagcttgaacccaggagcgggggttgcagtgagccgagatcgcaccaatgcactccagcctgggcgacagagggagactccttctcaaaaaaaagagaaaaaaagaaaaaaaaaccaggccctaatgtgcacataagggacagggtggtcagttctaactgctatttgctccacctgaggccagtgtggaccaggacaaatcctaacaggatggactgggccgttctaagcaacaggaccttctaacctcctttctgaacactgtgaggccaactgcaaaggtacccccccacccccaattccgatgtcctttcctcccataccatgttagaccgttgcaacacgttgcctcgttttcaaaaaacaataacaaaacttctaggacacaagctctgaaggaaattgtcaagaaagtgcgctggctgacttgtgaaataatctaatgttactaattcttataatacattgtaatgatttaagacttacagcaaactactgtgaactttcaataaccctataaataacacgtgccattcccgtctttaaaacttaaataacaccatgcaacataaaacagaaacatctccaaagtggtttttaaagtctgttcgcggttctggtgcctcccgcgtgtaatccgcagaaatctcactgaaataggctgaactcacaaggccttagaggggtttgggccctgccgcgggggcccacgtgggaagcggccgagagccccgggccaggctctaagggagcgcaggaggatgccgtccccagccggccgtcccgtagactctccgcgcgtacccgcgtcctgggctcgggggcccagtcccggaaagccctctcgggggctgtcagctacggaggcgcaggtcgcgtctgcccggtcgctcctgctcgcagacatccaggccgacggcccgcgcggtccggagagtcagcagtcgcggccgagcaggacaatcggcccaggacctgcgttaccagagcgtgcggctttctgaagctaggcgccggcnnnnnnnnnnnnnnnnnnnnnnnnnnnnnnnnnnnnnnnnnnnnnnnnnnnnnnnnnnnnnnnnnnnnnnnnnnnnnnnnnnnnnnnnnnnnnnnnnnnnnnnnnnnnnnnnnnnnnnnnnnnnnnnnnnnnnnnnnnnnnnnnnnnnnnnnnnnnnnnnnnnnnnnnnnnnnnnnnnnnnnnnnnnnnnnnnnnnnnnnnnnnnnnnnnnnnnnnnnnnnnnnnnnnnnnnnnnnnnnnnnnnnnnnnnnnnnnnnnnnnnnnnnnnnnnnnnnnnnnnnnnnnnnnnnnnnnnnnnnnnnnnnnnnnnnnnnnnnnnnnnnnnnnnnnnnnnnnnnnnnnnnnnnnnnnnnnnnnnnnnnnnnnnnnnnnnnnnnnnnncccggggcccgcgtacctgtggaaggagacggcgcgcttctcgccctttccctgccggttggagcagttcacgaccgcacagcagatcaccatcgcgggccttggcccagccgcgcagccaggccccggccctagccgcccgcccgcccgcggaccgccccgagggagggagcgcggcggcgacacggctcgggacgtgggccggcccgcggcgtccgcgccgtacggcaagatggaggcgcaggcgcccgcagcgggcccgcccccgccccatcccccgcccgcgtcctcgccagccgcgggttcgggcgtcttcggaccagcggggcgccgcaggcccctcgcagcgtccgtcggcaggcgggcagacgggcgggggagtcgccccggcggggcaagtccgtaccgcgacatgggcgcgccgagcacgtccgtaccgcaagatggctgctcggacggggacagagctcgcctctgccgcctcgacaactgctcctgggtcctctaagaggaggaagcgccacccatggcacacagtgtcccgtcggacagcagaaccagccgtcgtcccacgacacgaccccatgccgcccgcagggcgccccggggctcgcgtcggcccggccgtacgccaaaatggcggctcccgcgtatttccgctcgcgcgccgtatcgtcttcgccgcctgcgccggcacacctattggcccccgcggcgtcccgtcgccgcgtcgcgttgctggcccgtcggagcgacgccgctcgggtcagtcggcggccggactgggaagatggacgcaggtgaggagttgccgggggtcggtctttccgcaggaggtgctcgccttatcattggcctcccctgctcgggtcgggctgccgcgactcgcctcggggcacgccggtgcgggccaggctgggccggggcggcgggcgctgcgggagcgcggggcggtgttggtgggtggtgggcggtgggagcgggagggggacggcggcgcactgcgccgcggaacccgccgtcggttgcgctggagcttctgcttttccggtcccgtccggagcgctccggaggttgtggctgcacaggcccttgcgccaggtcggccgtggagggcggcggagcctgccgggcggggagaggcgcggcggcgaacggggcggccgcggtccgggccggggacgcgagcggcgggcgaaagcgtagcctttccgcagctgagcgtgaagggatggaagctctttaacttttatgaagttattggtaggttggaggagagaaacgtgacgtgttcatcacagtatacgtatcttttttgtttttgtyttcaatttagtaaccagtagattctccaagctgcttttccgtgacgagaaagagaaacagtgaatttgtatcatcgggtcttagtttcttggggtcctaagagagagagaaagagaaggagtgtgtgtgtgtgtgtatagggagtgttggtttttttcctatcctttcatgcttccgctccatttttgctagcaagattattttaagtcagcgccaaacccatcgctagcccagtagccctagaaatatttttacacagaagttttagctcattcattctttgtaggaactgatttgccttttaccaagtatcccccatctgtaaagaaagattttcatctggtttaattctgtcattctgaatgggattgtttttactttttatttttctggtagctacaacataaatttattaagatctgagttggaaaactgtaatgtgtattgccaatatctattaaaatgatttgtagcagctcaccacttaaatgtggtaggtggctggaggaaacaggagccctgactccctaaggagcatgttgaccaggtgtatatcttgtgaagtttgtcttttagaataaccgtcattcacggttgaactatttgcagctgtgtactatttgttgtttactattttacaactgttgtattatatctttttaggtgttattgtttgtgatgcaggatttttctcagccactctggcagccagagacctccggctggcgaggcccctgcccaggccttgcttgggtccaggctcgccgcaggagataccccatctacttggtccaccggtgggcacctggtttgcactatggcacggataccatggccaccatgactgtatgctcagcccctggcgggagtgggtgtgtgggtgagtgagtgccgggtcccgccagctgtttcaagcgcaggcagcagagtgggctctgcagagcttacagctagacatgtggcaagcaactcccacggcggactccagcgtccagacaaagggacagtggattctggtgtccagacaaggggaaggtagtggcgcccaagcaggggtgcttacaaccctgaagcccaagaggggktgttgcagagtgtcagcagccctgttactcccattgccctgctccaggctatagctctggggctggctccgtccccgctgcttccctttgctgcctcctgtcacgtggggtgtcacagtgggtggctgccctttgccggcagagggcccagggccacagtgttacagccttctttgtacttgcattcattgggtccctagttcttgtcccacgtccaagaagaatgagactacacttaacactgacaatcgaagggtgaggagggtggagaatagttttattgagtgatgaaacacccctcagcagagaggggactcaagggtggtcttccacccaaagtcgggtggtctcccttggtgtggctgggtccagggcttttataggctcagaatggggagtgtgtgctgatttgtctgtgagtatgcaaaaaaggttaaaacaaagtcactactcaaaggtgggcacaacagtgtaataaaccaattagagaaaagtaggtatatgtaaaataggtgaagggtggggattaattagaggaaagcgcaccaaacaggaagagaggttcgcaatccagtctgtggatttatccgagactcgtcgcttggctttcaggctttaaactgtggcttgaaggttgggtttcactggtgacccacccctctctgcctaggatttgtctgcctcctgcctctatcatttcgataccttgaggctggagtatcatatgagagacttggctaaggtcaaaaacacggttcagtgtcgatcatatgacctaaaatgtgaaaatcatcatgttcaagttgggagaacagttatgttgttacatggcgatactttattttatcttttattttcccttgacaactgtgttgacatggtgatactttaataggacactggatgctgctgcatgtgggatcagagtagaaaaggtgtttgcatttaaaggtctctgtttatgctgataaaaacgtatatgatgtttgtaggatatcatggggaattttccttctgacttgatgctgtatttcctttcagagatgattaatgatctgccctcctttgatctctagagttcttgaagattctgccttccttgaccatgtgtaatacagtttctgttctgatagtcattaattcaatacactgtttgttactgactgtcagatatgtgttaggcattgttctagacactaggactagagaagtaacaacatagatgaaaaccattgccctggggtagctaacgttctagacatgagaccagcattagcagcgaagtgcgtggctcctgggggatggtgatttgggccaaggatgaggaggattggaattgtagccaggatggccaggaagggtctcactctgaaggtttaagttttgacgaagacttaaagcagtgtaggaggaagggcaggtagcaagagcctggtgtggctcrggtgcagcgggtggcggtgggagaagcaggagctgaggatagaaaggtgacttaggctcagtgtagtggggccttgccagctcatagtgaggactcggtgtttattctgaacaggatggcagctcatagtgaggactcagtgtttattctgaacaggatggcagccgtttggaaggtttcattctagaggaggagtcacatgatagactgtgttcaacaggcttgctctggcatctcttttgagaatgtactgcagaggggcaagggcagaggcarcgagaccagctaagagactgttgaacaagccagcaaggagatgccagtggattagctcagggtgggtaagaggttgacttctgcatgtgttttggaggttgagacaatagaatttgtttgtagattggaagttgggagagggatgggtagagaggggaggagttaaagatggccccatagtgtatggcctgagctaagcaactcagatggaggggggcggggcgtggtggctcacgcctgtaatcccagcactttgagaggcctaggtgggcggatcacaaggtcaggagatcgagaccatcctggctaacacggtgaaaccccgtcgctactaaaaatacaaaaaattagccgggcatagtggcgggcgcctgtgatcccagctacgcaggaggctgaggcaggagaatggcgtgaacccgggaggcggagcttgcagtgagccaagactgcgccactgcactccagcctgggcgacagagcgagactctgtctcaaaaaaaaaaaaaaaaagaaactcagatggggaagacttggggaggtcctgtctggtgggaagctttctgttgcgagtttggatttatgtgtgttgaatgtgaggtggatgttagacatccttgtagagcagtgtccagtgggcttttgggtctacaggtttggagctaaaagaataagcctgggctggagatagactggaggtcacatcagatgaggtcacccagggtgtgaatgtgggtgggaaagaaaagaggccaaaggcctctgcgggtgtggagaggtccaggaggtggcaggcagaccacagtgtggctgtgttctccaccagtccctagcactgtccctaaaagcatgctccccattcagacgactggcaggtgccagcacttaaatagccacactgcccattccttgaggacagagctggtgtcttgtgcttgcatttctagtgcatcacttgtgtctggcatgtggttggtaataaaaaaaaaacagaacttgaattaataataacctacacattcccctactatcaaagctttcagtttgtagagtttaacataaatccagtatgttagcataacatgtaatgaatgcagaggctgctggggagtggtttttttttttttcttgagacggagtcttgctctgtttcccaggctggagtgcggtgggcgcgatctaggggagtgggttttaatgtgcgcaatctgcccagtgtgtgcactgaaacagtgttttctagctttctgatgtagctaaatttggagttcctttctctctttctctgttttcattcaggactgaactactagcattctcatgtaaactcttggagatttaaaaaaaagtagtaatcatatgcaaactgttatcttaaacctaagagctttctaaaggaaaagaagaacctttgttgaatttataaaatataaatcttttggaaaataacttctaagtgttttaggaaggtttcttcgaaatgaagtggtttacagtaagctcttaaatttactcgttttttttttgtagtcctctctggttgaatgaagtgtaattggtactaaatggagagaagttggttaaattcattgagtacaattccctacatttctgcctgtcagattagtagtactaagtcacatgttttttctgatggaattactatattattaaaatgccatctgccctcttctgcttgtgatcgcagaagtcccagggaagagggcgtggaaaatcaagtgtctgggatccagccgaccaaatgggagaactgcttctaagggggactctttcttaaggtgtacagcacctctccgtctttttttttttttttttttttttttttttttttaagacggagtctcactgtcgcccaaactggctggagtgcagtggctctatctcagctcactgcagccttcgcctcctgggttcaagaaattctcctgcctcagcctcccgagtagctgggattacaggtgtgcaccaccatgcctggctaacttttttatatttttagtagagatggagtttcaccatgttggccaggctgttnnnnnnnnnnnnnnnnnnnnnnnnnnnnnnnnnnnnnnnnnnnnnnnnnnnnnnnnnnnnnnnnnnnnnnnnnnnnnnnnnnnnnnnnnnnnnnnnnnnnnnnnnnnnnnnnnnnnnnnnnnnnnnnnnnnnnnnnnnnnnnnnnnnnnnnnnnnnnnnnnnnnnnnnnnnnnnnnnnnnnnnnnnnnnnnnnnnnnnnnnnnnnnnnnnnnnnnnnnnnnnnnnnnnnnnnnnnnnnnnnnnnnnnnnnnnnnnnnnnnnnnnnnnnnnnnnnnnnnnnnnnnnnnnnnnnnnnnnnnnnnnnnnnnnnnnnnnnnnnnnnnnnnnnnnnnnnnnnnnnnnnnnnnnnnnnnnnnnnnnnnnnnnnnnnnnnnnnnnnnnnnnnnnnnnnnnnnnnnnnnnnnnnnnnnnnnnnnnnnnnnnnnnnattacctggaagtctagagatgggtctatatatttatttatgtatatatgtacatatatatatataaacatatatatacgtatatatacacataaatatatacacatatatgtataaatatatatatacgtgtgtgtgtgtgtgtgtgtatgtatatatttttccccccccccgtcgtccaggctggagtgcagtggcgtgatctyggctcactgcaacggggttttgccatgttggccaggctggtcttgaacccttgacctcaggtgatccacccaccttggcctcctaaagtgctgggattacaggtgtgagccactgcacccggcgagtggatattttttccgaagtttgactccttttctatcaggagctacatgaattaccttataaatcacatgatgtggcaygggaagatgatgaaattatgacaggggctatgaaataagacaagggaacctctccatggcgaattgctgaggcagctggtgtcaggcctaagtggatctcatwcatctgagagtcagtgaaggaacaagtgtggtggctcacacttgtagtcccagcactttgggaggctgaggtgggtggatcactggagcccargagtttgagaccagcctgcttaacatagggaaaccccacctctacaaaaaatacaaaaattaggcatgacggtgcatgcctgtagtcccagctactcaggaggctgaggtgggaggatcccttgaggccggaagggggaggttgcartgagctgagatcacaccactgcactccascttgggtgacagagccagacccttgggtgacagagccagaaggaacgtttgggaatggaatcatcgtgttggtcgatctgcagatgttagtgattgtgagcgttagttttgcacccattgtgggttctcaccccacttggaaaactggtggctgtgccccatttcatgggtgaggagactgaggctggaagaagtccaggcctgtgtctgtcctgtagctatygaccaggctctcagactccagaaacaaacctcagtaggaatcagaagtgttggccgggcgcggtctgcctgtagctatcgagcaggctgtcagactccagaaccaaacctcagtagaaatcagaagtgtcggccggttgcggtggctcatgcctgtaatcccagcactttcggaagctgatgtgggcggatcatctgagatgaggagttygagaccagcctgaccaacatgggagaaacccatctctactaaaaatacaaaattagccaggcgtggtggcacacacctgtaatcccagctactcgggaggctgaggcaggagaatcgcttgaaaccgggaggcggaggttgcagtgagccgagatcgtgccattgcactccagcctgggtgacgagcaaaactccatctcaaaaaaaaaaaaagaaagaaattagaagtgttaattccaaaaaagttatcttcctccattataaagtaagatctggaaggtcagggaggtctttgtaccgttctgatgcctcagtccatggctcctcattgtgtcttcctcttcagctggagctgcgagggtgtccaggaggggtgarttctgctcggagggcctgccgagggcattccttcctgtcctccagcatgagagggacagtgtggggcccctagagtacagggaagacctcctyataactgaagagatgcgagtctgagagtctttattggctcttttgtaggaatcgctgcaggtctctttggtccttggagccagcccgtgaggccgggggcaggctcttgctctctaaatgcagtcactcttggaggaaaggacgttatgttggattcagtgttagtaaagagactcatgtttggttgggtctctgttgaccttgtactctgtgctgcacctctgcttacagaatacctcccawccatgccggttcgtgactgctcacccgtttcagtgatctgagarggctggccctgaaagagtggttactgctcccgtgcagtttagagcttttcctgcaccttgacttgtccgtttcacagtgaggacaccaagtcacaagaaggtcactagcctgtaaggttgcgtgactgctcagtggtgggctcagacttctgactccacagctggcgctccagctgtcaggaacgtgctccaggtgtgacgtgtggacactccccacttgcagcgtcctccacagtaccgagaggagggtgcagtgtggtgggagaagcaagggatcatgttttcagagtgtccgccactagccctaggggaatgtatgactcgctcccaacagagggcaggattctcggggagggccggagtgcgtttctctggacggaggagcagagcagcttggggcacggtgtgggagccctccttagggacctcatgggtcacgttcgccgtgrctgcgccactcctgttcactgccaagcaccgtgattgctccttggatttgctcccctggggtttcctggtctccttgatggtttatacagtgagcaatctgaggccacacacctgtaattttcacagttatagctggaggtgtggtggtgtatttgaacttaatggaacacctcttattcccttcactctgaagttggcttccttgcctataaagtttggtgataaacctaagaaatacacctgctrtgcattttactgcgtccgtgatgaaaatccctcaacttcacagccgctcaggcctcgtgaccctgctttcagagggagcctttttccttttcttccttatctatacttctctcattcctttaccatttatatttttaatatgggaaactagacatcctagaagtttctcagcttccagattctgttactgcagactgttactgattcaacaatatggtccttttcctgatgacatacgccacattcttctgaagtacagatggtctccaaactaccatggtttgacttacaattttttgactttacgatagtgtgaaagcagtatgcattctatggaaaccatacttgacgttttgaattttgatctttttctgggctagcagtatgcctccagatactctcgagatgccagatagctcctcgtcagccacatcatgagaagggggaatgacccctgctctacagggcactgtgttgccagctgagtttgcccaactgtaggctaatgtaagtgttctgagcacatttaaggcaggctaggctaagctatgatgttaggtagattacgtgtattcaatgctttttttttttttttttgagacagagtttcactctcccacctgggctggaatgcagtggcgcgatctcaggtcactgcagcctccgcctcctgggtttaagcaattctcctgcctcagcctcccgagtagctgggattacaggcacctgccaccatgcccgagtaactttttgtgtttttaatagagatgggatttcaccatgttgaccaggctggtctccaactcctgacctcaggtgatccacccgccttggcctccccaagtgctgggattacaggcatgagcccctgtgcctggcctcagtgcatttttgacctaagtattttcaatttacaatgggtttattggacataatcccatcctaattaaggaacatctgtagtctacaaagagatacttgccagtgttcatttagctctgctgtactttaaataaaagatatgtgtatctttagttcaaagctggtgccttggaacggtgtcaaacatgagaagaatgttccaacagcaagatggaatcattgtcttgcagtgttgaaattagaccggtggtggccaggcgcagtggctcacgcctgtaatcccagcactttgggaggccgaggcgggaggatcatgaggtcaggagattgagaccatcctggctaacacagtgaaaccccgtctctactaaaaaaaatacaaaaaattagccaggcrtggtggcgggcgcttgtagtcccagctactcaggaggctgaggcaggagaatggcatgagccgggaggcagagcttgcagtgagccgagatcgcgctactgcactccagcctggtgggcgacagagtgagactccgtctcaaaaaaaaaaaaaaraaaagaaaagaaattagaccggtggtgttttcatcctttttccttgagaataagttttctggattttagtctatatattgaataaagcctacaggtcaaagaatagtagggacttctgaagattcaggagtggctttagagaggtagcagggacatcatgatgtttttcagctctttaaaaagataggagtgggccrgatgctgtggctcacgcctgtaatcccagcactttgggaggccgaggtgggtggatcacttgaggtcaggagatcgagaccagcctggctaacrcagtgaaaccctgtctctactaaaaatacaaaaattagccgggcatggtggcagatgtctgtaatcccagctactcgggaggatgaggcaggagaatttcttgaacccggaaggtggaggttgcagggagccaagatcatgccactgcacttcagcctgggcaacagagtgagactccatcacaaaagaataaaaaaaaggcatggaccttaattcatcctaattcagtttttgtaatcatgtgcagaaacaagtaacatatatataaaaaggcaggagagaatgtaaacttggactttatttattcacagtcaccaagcagtttggttgataatgtctctgaaagcatggacaagtgaaatatgtaagagcagagctcttgggggccaggtgcagtggctcatgcctgtaatcccagccttcgggaggctaaggcaggtggattgcttgagcctaggagtttgagaccagcttgacaacatgattagacctcatctctacaaaaaatacaagaattagctgggtgtggtggcacatgcctgtagtctcagctgctcaggaggctgagaccggagaattgattgagcctgggagtttgaggctgcagtaagctgtgattacaccactgtactccagcctgggtgacaaaatgagtcccggtctcaaaaaaaaaaaagaaaaaaaaacaggagcagagctcttggacaaagccctgctgtggaaagcttgcttcatctggctgcagccgctccacaacgcccgtcatcttgctcaggaagccacagcactactctaggaaaggggcagagaggggcctgggtctcccacagctgagaatcctttaaacagtgcctgtagggccctctattgtggatttggtagttctgcctgcaccgagggagatgctwgcaggtgcttctgaaccctgtgtttgggaattagctgcgcatacaattaaggcttttgggtatagtaaaatttgtgtgcctttgaccctgtggttctgagtcctcgatgttaatgacagagcggacattgcagcccttctgtctgccagccagcacctcattggaagtgtttcattgaaacgtcacacccatatgctgaggctgtcctgttgttatcccattttatggatgagggaacattcacacttagaagttaagtgagtggcccaggaaactacagtttaccagtacccaagctgggctttaaattctgactgccccctgcctccccaaggggattgtgcacagcacagaagttcacacacgatgctttttagtatcagcttaggtggagatctgtgtttatgtagaatgctgaggaaaccacaggcatagtatgatttcacgtacgaacctgtgcataaagacttctggaaagagtcattgctgggcaacgaggcttcacgtgatttgtgtatttttgtagtcttcagaattttttatgattagcatatgtcattcttattgaagtgtggggttgttatcaaaaagtaaatttagatgtgggagaaattcatatgtgattgattttcaaaagattgctgtaaagttgctggtgaaggatgagtgatcagacaccatcagagctggagaggcagcagatgggaattgtgtgttcccagttccctgaagagcagctggagagagatgcctctggtgccgccccagaatacgcaatgggcatctcgccacatgggtgtttgggctggtgcattgctgctggctggcgccttcttttcaggaacattgtgggacatgggtatcctcagccacagttctgtggacaggaagaccctgggcctctctagtttctttctttcttttttttctttttcttttctttttcttttttttttttttttgagatggagtttcactcttgtcacccaggctggagtgcagtggcacaatctcagctcactgcaacctccaccttctgggttcaagtgattctcttggctcagtctccctagtagctgggattacaggcgcccgccaccacgcctggctaattgttgtacttttagtagagacggagtttcaccatgttgaccaggctggtctcaaactcctggcctcaggtgatctgcccacctcggcctcccagagtgctgggatcacaggcatgagccactgtgcctggcctagtttcttaattgaagtaaaacagagtaagatggcatgcagggctaatcattagcccagcaggtaagcaccatggctctgcagccagctgcctccttagaaagtggggtgttgcsccatggaagtggtggcatgctcttctggtagcattgttgaaatgaaaacaggttcagtccttgatcactaggctttttgtacccgggtacctctggggacttggcagagagtttgatctctcagtgtccaggggttaactttctacctgagagtagcaccccatgcttctccagcacctgctcctaaccaggaaattggggtagaccagaaccccagtcttcccagcagctcagtgtttcttgcccyggagcatctgccttcatcacagtgactctgaacacgctgccatggtgacatctggtaaaccttaggatggccatggaaaacgactctttgccctgtttcttcttggcttcccttgcgtacaaggatgaaggaggtggtttaactttatttttgtcctttactttttaagtctaaagtaagtgcttgaatcgggtgggttttcatttttttgctttctcacccctcaggttggcccctracttggcctctcaccctcgtgtcagctgttagacactgactcagtggctcagaatatgaaaggctcaggaagtagcatgctggccccacctccctgtccccataccttagcagagcagctgcccagcagggcctcctyctctttcctaagagtttactccatccatggtgggtgtcttggtaggcccgagatacgagagggagtgctgctgttacaagaatttacagttgttctcttcrgcacagaaatgctgtaaatggcctctttcgatactagtttatgaaattataagtgtctgatgattgtgcatctttggtttcaacagctactctgacctacgacactctccggtttgctgagtttgaagattttcctgagacctcagagcccgtttggatactgggtagaaaatacagcattttcacaggtatcggccatgctggagcccaccctggtctgaccgcttggcctgcagaagcattttgtgatcactgttctctgctaactctgccataacttgtgacttgcaaacttaaggcgttgtgtgtgtgtgttttttttcttttaaacaacctctagaaaaggacgagatcttgtctgatgtggcatctagactttggtttacatacaggaaaaactttccagccattggtaagtactctgttttattacaacgcgggacaaaatatgtttttaggaaggaggaaaacttacgcttgtagatttgacttcaatatgccactgacttcatttgaatcttcacagcaatcctgcttaactgaattggccgaggcctcacgtgtagtagtggcaaagctagaatccacggcgcctgactctaggctagtgtgttttcaactgcaaatcccagcttattactggagctggaaatcagtatcatgagttatgaccaacgttgttttaaatgtaggacagaatgtcatagaaagcggtgtgtgtccgccacgggcacgcagcatggcgcttcagggatcttcgttttcgtttgcatgtttgagtgtgtgttctgggtcacagctgtacaatgtgtttcttacttaggtccagaatgtttggaagccattctctgtagccctcatcttttttagtattttccacacttaacctgtggggagatttgaagggccaggtgaatgtgacatgtttttatgtaacactaaggtgcattctgttaaaagccattcatcattgttgtataccctggagctggaaggagatggggactggttctcagccttgcctctcaccggcggagaactgaggccggaggtgagggccgggctggcgtcatgcttcctcagtgccaggtcagggtttggtccctcttctaggggtggtttcattctttatcctgaagtgaggtggaagtcaaatagccacaacggctggacattggagaacactgacgcgtagggacatacgacagtgtctccttaggttgatatttaatgatacaccttgtgagatgtaccctgggaatattgatatgtaatgatatattttaatgacataccttgtcagatgtgccctgggaatagttgctcattccacagtttccgcttgtttcgcagctgcgctgaacctgctctcttggccgccttggatgcaggtttgtccccagcctccatctccttcacagctaccctgccgcgtgctgggaaggagaacaggactggagcgaagcctttctggtttggcagaggccttgtggaggaggtagaggctggggatgagcctgcacatgaagcagccctgtcgcagttctgaagggcagtgtgctgtgtttccttcttagccccacggagataattttttaaaattattactttcatttttttaatagatggggtttcgctatgttgcccaggctggacttgaactcctgggctcaagcagttctccctcctcagcctcctgagtgtctgggactacaggtgcacaccaccacgcctggctctgagatacgtttttatcagcagtagagcgatcagcagtggagcgagggtgaccatgggcactgctgattgggttgttggtgggtgacggccaccactaccccaagacacagggtttattgtccgtgccagtgcatggagaagctgccggaagcccagaggtgggcacagggcgaaccttgtggtctgacccctgaatctctgcttctcaccctggtgtgcagccacctagcagcctcttgtctgctgcacaggtggccctctctgttgtcacagctgtgcagtggccttccactggacccctgctatgggctggcagtgtttcccacgtgcctgtcacatgccgcgcagttccatggtgcatgttgtccatctttctgggccccagggagtggccgtgagggcagggcccaggcacctgtgctggaagggctgagttgctgcccttgcggcccttcctgtgctctcagcagcactggatgtcatcaagcgtttgaatttctgcctttctgataattggaaaatgcgttgttttgtttaactttgcattttctggatgacttacgrgggtcagtgtcttcatatgtttgtcagacattccttttgctccgtgactgacttgttcatgtgttttgcccattttgagraggttgtcgggacatttcactctccagtaaatgtggcccttggcgttactgagtcctaagaggtgtgtgttgccccaggtggagctgatggaggagggagtcggtgcctgtggtgtgggactgacyggctgcctcctgccagtgggcttgtggcctgtggggccatctggccatgagcacttctctctctgtctgccacgacaggggggacaggccccacctcggacacaggctggggctgcatgctgcggtgtggacagatgatctttgcccaagccctggtgtgccggcacctaggccgaggtgagtcacagccctggggagggcgcatggccacggtgttctcaggaagcaaaggggactgtggggtcagggctctttagagcagaccrcaggtaaaacagtaagtagaacttgggggtttcttgagtaatgagccacttgtttttcttgatttaaaaaactgactttaaagaatgctaataaatccgcatgggcaacatggcgagaccccgtctcacaaaaaatacaaaaattagccaggcgtggtggctcctgcctgtagtcccagctacttcggagactgatgtggagaattgctagaacccaggagatggaggctgcagtgagctgagatcgcaccactgcgctccagcctctgcaacagagttagaccctatctgaaaaaaaaaaaaaaaaaaaaagaagaagaagaatgctaataaatgttttaaattactgaaactgttttctgtacagatttgttttgataacttggcgtatatgtatttgaaatcctggagaacatgggtttttacttttaaaagattctgggctgggtgtggtggctcacgcctgtaatcccagcactttgggatgccgaggcgggtgggtcacgaggtcaggagatcaagaccatcctggccagcatggtgaaaccccatctctactaaaaayacaaaaattagctaggcttggtgrcatgtgcctgtagtcccagctactcgggaggctgaagcaggagaatcgcttgaacccgggaggtggaggttgcagtgagccgagatcacgccattgcactccatcctgggtgagagagcgagactctgtttaaaaaaaaaaaaaaaaaaaaagattctgaaaaaggtttggatgccatctgtatctttagtgtgaaagtgaaaacttgtttctcatatttatggtagagctgacctgtaattttttttccaatagattggaggtggacacaaaggaagagrcagccagacagctacttcagcgtcctcaacgcattcatcgacaggaaggacagttactactccattcaccagataggtgggaggctgcagaatgtgccaggccccacccgggctgtctggagagggtggagtggtcggtttcccctcagagcttttctggtgtcgtgggatgtggagcaggaggctgtaaacctgtaaacactgacctctgaccatctgtgcgctgctgtcacatcaccyccgtgtcatcccacatcacccccgtcccacccaggcccagaccctgggccttgcccttcctgctgtccatgcggcttgcagtgcctggtgctcggcacagtctggggaaattggcctcgccccatcagtgaatctgaatgctcagattgaagtggagtgagtaaagaagagttggcctttcttgcaagcaaggccggcttttgagcactgtgttttcacttatagaaggaagtggtcccttcatttcccctccttttctaagttcatagtgaaggacagtccctgagaccttgtttgccccctcatgcctcccccgatcttgttggggcatccttccgtctggaggctgggtcgggtgctgtccaggccttcctgtgacgtgtctcctggcaccaygtgccaccagaggtcagggctgggggcgggtgtgtgttgctaatgtgtatctgttccctgcagcgcaaatgggagttggcgaaggcaagtccataggccagtggtacgggcccaacactgtcgcccaggtcctgaagtatgtactgcgcttccactgctgagcatggggcagcagggatgttccctgggggttaaattctccttgagtcttcatggctacaggaaataaggggtctctaattatttacttcatggccctcagaaggtttctcagcgatgactgtgttgaggtcttgtgaataggaatttatgttttctaacaaaatgaacaccgtagtccacatcctggctggcacattggacccttgttctttgctgcatggatccacctgtaatggtggcttctgatggggtgggcagctgaagctagtctgcagccatctgtgcgggtgccgggcccttccacctctgcaggcttgttggaggctgccctccgcgggccttgccacctgcctttctcactctacccggagactccctgtagcctcgctcaccttcccatacacctcagcgtctgaaagtgtgctctgcacctgctccgcaccgcttcctttcgcacctcactcagccccattgcgtgcccgccccccagattcctctgagatgaccttccctgcagttccagaaacttgcctgtggtttcagcttcgtgtccactcttcactcctcttgacccatccagggtcatttggtctgattccatgtgtcctggcatcccagcatttttggggaggctctggccagatcccccaggacttgtcccctcagggtctcctccccactggtctgagggccagcgtctccccagcctgtcttcagccacggcccccttgaagcctctccttctgcatctgcctgttctgtatcccactcaaggccctcaggcatcccacgttccacattcctgaaatggccctgtctcccctcacccwcagcctgctcctcagcatggcagtcactgtctccacccagcttttctgtcaggttccctggggtcctgcacaagtccgtctctgccacatcccacgtcacccgcgtcccacgtcacccccgtcccacatccccagcctgctgctccctctgtctccagggcccgccctgtgtttggcgtggcacctgctcagtccctactgcatgcccttcagagtcctctgtccagcagctccccagcccccaccacacccttccactcacacttctcttgctgctgcctggagtggccccaccaagtcagcgcygtttctctggaagcaccaggccactcgccatgctcgctgtttctcctggtcccctgcctgctccccaccagcccccgcccctgttgctggatgatcctccccaacctgcaagtgctgtggcactcaggcacatggacggcttccagggctgatttgtccctggactccaagctcaggtccagctgcttattctgcatttccacctgggtatctgtgtgcatggtgacctgacagccagagcccgtgctggccccagcctgcttctcctacagtggtccttcaggtgctcaaaccaaaatctgggattgttctagacccctctttttgagacggagtctcgctctgtcgccaggctggagtgtagtggcatgatctctgctcagaatcccaagtgattctcctgcctcagcctcccgaagtgctgggattacaggcgtgagccaccgtgcctggccaggactcctctcttttttctttttttttgagacagtctagctcagtagcctgggctggagtgcrgtggtgcaatcttgggctcactgcttcctccrcctcctgggtcccggttcaagcagttctcctgcctcagcctccccagtacctggaattacaggcacccgccaccatgcccagctaattttttcaatttttagtagagatggggtttcaccatgttggccaggctggtcttgaactcctgacctcgtgatccacctgccttcgcctcccagagtgctgggattacaggcgtgagccaccgcgcctggccaggactcctctctttcttttttttttttttattttttttccgagacagagtctagctctgtagtccaggctggagtgcagtggtgcaatcttgggctcactgctacctccgcctcccgggtcccagttcaagcaattctcctgccttagcctcttcagtagctgggattataggcacatgccaccatgcccaactaatttttgtatttttagtggagacaaggtttcaccatgttagccaggctggtcttgaactcctgacctcgtgatccacctgcctcatcctcccaaagtgctgggattacaggcatgagccaccgctcctggccaattcctctttatttcagtgggcccattcaaaatatcaattcctctttctttcagtgggcccattcaaaatatgtccagactctgaccagtgttcatcctttcactccctgtgctggtcccagccccatcttcttctttcttgttgatcttccttctctctttgtcatcctagagtctctttagcaaataacagcagagccatctgcataaaacatattggccactgctctgccttgaaccgccctggctcttcactgctgactcaggcggggctctacccgacctccctggcatgacacsttgtgctcctgggacacaccagcctcagggcctttgcatgtgtggtgcctggcacttggaccctgttcccccgacacctgcctgggttgcgccccatgtctgcccaggtaccctttggcaccaaggtcttccctgtggctacgttagtagtgccactccccgttcctgcgttactgttctctgcagtgttgaccaccggcccacgtggctgctgcttccttgtttgccctccgccaggtcagctttgccagtgctgctgtgtcccttgtgtgtgggtgcgtcttcggcactgcatctgggctagaggtgggaggaggaaggtggtgtgggagtggggcggggaagcaggctgtcctcccatcttcagcactgcagctgggctggagatgggaggaggaaggtggtggggcaggggggcagtggggggcaggctgtcctcccagtgtcccccctgggcttgtgcattgggaggggctctgtgtggtcaccccagtcccctgctccacccccacccagctcccctccacaggtcttgcattctgtccccgggagcaccaggtctttgctgcctcagggccttttctattgttttaccttttgttgaggtcctctgaccccacctccgccagacctgagatgagatcagagtcgtgttagacttttggctgcagaatctgcccttccctcagaaggggaaatccaaggccatggttcctcctcactggcgtgcacagtcgtgcttcccactaagctgcagatttctctataaggactcagattccttggttgtcagctcagcgtgtttggtggaggggagagcagagcagagcgtgaaggtgctgggaggcctgcctcaaagttggcaaaacccacagcgtctcagagctgcgttcatgttctagttcctgcctctgtgccagtgagaccagaaaaccaggccactcaamagcctcttgcgtgtgctctctatgaatggaggctggggcaagggcaggacccctgggcctcaggcgagaagaagcagatttaccctcagctttcttcctgtctgtggcattggctgtgccccggattttaggagccttggcccttctcatccgagaagcacctctaacgcgaaccctccttcgcgcagctatagctgcaaagatgaaccgtctttgaattgtacaaaagcttatggtcattctcctactctctgtaggaagcttgctgtcttcgatacgtggagctccttggcggtccacattgcaatggacaacactgttgtgatggaggaaatcagtaagtggctcagagtttccatggacaagaaagttgaaatcacgggcaacatacacacttcctcgcctgagtccccacgggagcctcggcgagtgttgtcrgtcgccccatgccgtgcaggtgctccgtggggcctgtgcgccaagccagatgcacggtggcctcgctctcctatcccggcggtcataccaagagaggagagcccaggctgtctggaggccgcgacttggtatctcacgtcgtgttttgtgtcttggttacaaatcgtttatgaaggccctgctgtgcttaggcgccctcgtgtgggaattctggtgaagttattttgcgtgccttgatgtgcgacagagagatgtagcaaccatctctagctgcaccatctcgagcaaaggcacgtcgtgaaggcagagctcttttcagctttctggaagaaaggtctgctgcaaccctgaaggaacctgggcgtggcaayatttacatctaggaggaaaactgtggctcagttttaacaaatgggctcattgagtgagttccaaattcatgtttcaccttccatgatgtagccaagctgagaactcttaaaaatgcctcayygcctttttcactcagggccacctttttcccaaggaacttctcaaaactccctcaattccaattttattgaagttctacatgtaggctattgccttgaatccaattttccataagaaagagctcatttaggccgggcgcggtggctcatgcctgtaatcccagcaccttgggaggccraggtgggtggatcatgaggtcaggagttcaagaccagcctggccaacatggtgaaaccccgtctctactaaaaatacagaaactagctgggcatggtggcacgcgcctatagtcccagctactcgggaggctgaggcagaagaatcgcttgaacctgggaggcggaggttgcagtgagccttgatcacgccactgcactccagcctggccacagagcgagaatccgtcccccgccccccaaaaaaaagacctcattcagagccacagccgtaactgcgcacagattcacagtgggagtgggtcctgccctgtgactgtgggtgtgccaggtcaccacacaggtgtgtgctgggtcacagacacgccccttccctgcctctccattctgtttcttcrtcgtctggccatcctcgggggcattgtgacacagcggagggagtgaggcaggactttataagggagagtgaggctggcttctgcagcattgagagctttgccacagcaggctctccttccaggattctgttcctcagagacttgaacttgggatcataaccaaagggtgtttgtttcttccatctgcctttttcctccattctgtttcttgaaatttttataaaacattggaaacacaggaagagtacaaagaaagagaaaaattattgattttaccactcagaaataactcatatgagcattttgacattcttactctcagtatttctcctgtgcttttcaaaaacttacatagtttcctaagtattttctcctggccatgagtgacagcattgtaattattaactggctacacaatatactattataccttagttccctgttcactgccccatcctccctcccgtgtttggggaaatcacttaccccctcgttccgcacgcgtgctcaggatctcaccaagtcacacctcagtccctggcctcggattagggaggctgttgctgggtgcagtggccaggaaggcgcaagggtcagggcttcctagaacctccgtccctctgggtgcaggtagcactggtgggagtgttgggggcagcttgtctgtgtggactccagctccgtcccttcgggagtctcagggctgcccaaagcagtgctgctgaaacgtggcttgtcagagtgagagtggagtcaggtcctggaagagcttgaatctgcatttcccagcccctggggatggtggctcccgggaggatgtggaggctgcctggtctgactggcttcgtctcactgcgtcagctgcctgaaaggacactgttcctcacaggagcatgtggaaggtgcctgatgcccccatttaggaagaaaggcatccacatccagccagcaaaggcactggcattgatgcacaaggcttgggtttctgggttcctgagtgtggcgtggtgttgtgaggaggacatcggggtcgttctgaatgacccctaccaaaagccccaggagggagtagtggggggagggcaggaagcaggctgcttttttcagtcgtgctgctaagagtgcgcaagggaggacgtctgaggaagaagtccgcaaagccgaagctagagaaacagacgtgtccttggctaagcaaggacttttcttctagtttctcggaactgcttgtggaaggagcagttagataggagaagactgatgccattcagaaattccactaaagcttcttcctgcagcgaaagagctgcctgacggtgttcccactcagattttaggtgaagcctgtggggtaaggggagaccttactgcctacagtgtccccatccaccaacccatcccccccgcaactcatccttctgtccacccccagtcaaaggccagccaggacatccttagcatgctcttcttgtccttaacgttgatgggcttagacctttctaacgacagtagacagaatgtcactgaatgtagggaggaaatacagattggaaaacgtgtcagtctggcagtgaggacaaatgactccaatgaaagaaaagtaaataccagagcaagcacagtcagaaacagagtggggaggagaatcacaatagctgraactcaactctctgagaggcagtgcagccaaatagaggcagctgagagcagagtatgtggattagaacttttcgggagagttggccactgaaggagtaggagaaaattcccctgagttggtgagagttgagtctttagagctaaagacccccaaatttttttatcagaagtacttaaacatacatrttcctgataatatttccaaattgcagaagtaaagggaaacttctctaaacatccaaataatagtatcactactaagctgctttgaagaaaggcagtctcaactggcctgggcatctcatctttgtgccataccaaatgctactggaaaatgtttagaattctgagaaaagacctggcttcatgaggtgagagtaggtatgtgtactgtgtagttgtcattgatagagaaatataaattttaaatgtgttcaaaatataaagagaacacgagaaaatttcaggtggtggcaggaataggcaaaagcccgttgcaccctgttgacagcagggtgtttgtgacgtggtaggtcacacactcagtgctgggctctggaggcacagaagcaaccggcccagctacgcatcagcccttgagccgattcatgtgttcgatcatattcctgagacagtagggtctgtgcaggtaacaaagcaccagtcagcaggaaactcaccaccgggaagcctttctatcaaaacataacttcaaaatcagtaaagtgggccgggcatggtggctcaygcctataatcccaacttcaaaatcaataaagcgggccgggcgcggtggctcacgcctataatcccaacttcaaaaccaataaagtgggccgggcgcggtggctcacgcctataatcccaacttcaaaatcaataaagcgggccgggcatggtggctcacgcctataatcccaacttcaaaaccaataaagcgggccgggcgcggtggctcacgcctataatcccagcacttcgggaggccaaggtgggtagatcacatgaggtcaggagttaaagaccagcctggtcaacatygtaaaaccccatgtctactaaaaaaaaagttagctgggcatggtggcacgccctcgtaatcccagctgctcgggaagctgaggcacgagaattgcttgaacctgggaggcagaggctacagtgagctgagatcatgccactgcactccagcctgtgtgacacagtaagactgtgtctcaaaaaaccaaaacaacaaaaaataataaaaatatatagaaaacagaataattaacagattagctatggaaagatcaaagctacaggggacccagataacacaacaggcagagtttagtagatacgtgtcaaaccctagattgtgacagcagagtgtgcctgggaatttctatgaaactaatgcggaataaaatgaaaaaaggacaaaaccctgctgcctggaaatgtgaaacctcaaaaaagtcaagtgtagagaccstaactatgtatctgaacctgatgtgtacagaactcagaagaaaacctgtgtatcttcagtactagtatatgggttctttacaaagtgaaaattaatgaaataagcatacaactcaagaattcggaaaaagcaaaattaactgaagaaaccaaagaataatattaaagacaaatacagaaattaatgatttaaaggaagaaatgtattaggccaggtgtagtggctcatgtttgtaatcccagcactttgtgaggctgaggcaggaggattgcttaaagccaggaattcaagaccagcctgggcaacatagccagacgtctattttttttttttttttggaacagttctgctctgtnnnnnnnnnnnnnnnnnnnnnnnnnnnnnnnnnnnnnnnnnnnnnnnnnnnnnnnnnnnnnnnnnnnnnnnnnnnnnnnnnnnnnnnnnnnnnnnnnnnnnnnnnnnnnnnnnnnnnnnnnnnnnnnnnnnnnnnnnnnnnnnnnnnnnnnnnnnnnnnnnnnnnnnnnnnnnnnnnnnnnnnnnnnnnnnnnnnnnnnnnnnnnnnnnnnnnnnnnnnnnnnnnnnnnnnnnnnnnnnnnnnnnnnnnnnnnnnnnnnnnnnnnnnnnnnnnnnnnnnnnnnnnnnnnnnnnnnnnnnnnnnnnnnnnnnnnnnnnnnnnnnnnnnnnnnnnnnnnnntgcctggacctcattctataaaatattttaaaaataaattttaaaattaaatttattagaactaacacatactagaactggctctttgaagcaataacatatatgttttaaaaaaatcaaagttaaaatccctcccttggctaagcrctgtggctcccgcctgtaatcctagcactttgggaggtggaggcaggcagattgcttgagtccaggagtttgagaccagccgcctaggtaacatggtaaaacctcatctctacaaaaaaacaaaacaaaaaaactagccggacatgggggcatgtacctgtagtcccacctactcgggagtctgaggtgggaggatcccatgagcctgggaggttgaggctgcagtgagacatgattgcaccacttcactccagcctgggtgacacagtaagaccctgtctcaaaaaccaaacagaaacccaaacaactcccttaaggctgggcgtggtagctcctacccataatcgcacctctcagggaggctgagttggaggattgcttgagaccaacctggacaactccctctctataagaaatagaaaaatgaggccaggcacatggctcatgtctgtaatctcagcacttcgggaggctgaggtgagcagatcacttgaggtcaggagttcgagaccagcccggccaatgtggcaaaaccccgtctctactaaaaatacaaaaattagctgggcgtggtgacacacacctgtaatcccagctactggggaggctgaggcaggagaattgcttgagcccagaaggcggaggttgcagtgaaccgagattatgccactgcactccagcctggacaacagagaatcggcttcaaaaaagaaaagtcagggggcacagtggcccacacctgttgttccagctactcgggaggctgaggcgggaggattgcttaagtgcaggtgtttgaggctgcagtgagctgtggttgcaccactgcactgcagcctgggtgacagagtgagaccccgtctctaaaagaaatttaaaaagttctgtctcagaatccttgttttccagctgtctgttttgagaaatttgagtcctacaaaaaagttcagtgagtcatggccacaaaccctccacctagatccaccaattgtgttttgacacgcttggtttttatgagcaagcctcctacgaatgagagtgttcctgagagccacacagcctcatcaccacaaaagaggtgacgccacgactcaccagggtccgtcttggccccttgctgtccagggaacaacccrtgccgctgatttgtgttcctggttgagggtccggtgctgtgtgtatatagttgtgatgtctttctagtctttaattgagaaggttctgcctctttgttgtggttgttgctgctttgtggcatttttgacgagttcaggtcagctgaccatcccacacgctggatttgtctgcttcctcacagttgggcttgggttgagcctgtggctgagagtagcctctgggtggcagtgtcctctgctctcccatccggggcctgcagtgggacactatgtcagatccccrgagatggtgtcttttttcctttgtaattaatgaataatccagtggtgacactgagcatgtcctggtgagctgtgtgactcctgcctgataatggtggtttttctagcctgtcctttcctttcacgtttattggttggcgttctgagaagagccgccttttctcccatcacttagtgtgcagtgtgctacctgtcacctgtctgtcacctgtcagtcactgtcacctgtcactgtcactgtcacctgtcactgtccatctttttgatgcttgacggttccacctttggccggtggccacctcagtctggtggtgtcttttgccgtgttctggcrtttttcgtttatgttwtgagccctcccttatgttctgggttaagcagatgctgcaggcacctctgaacattccctgcctggccctggaatcagcctggctcctctgagtggggagtggtgttgagaaacctcgatctagacgccgggcatgctccatgctcccggagtgtcttctcccatcaccgcaccctccggttgatgtgtcctccggaccattgactcaygggtgtgtgtaggcagaaggggtggaagcgaggaaaggcgttgctgaggaggcccggagggagcgggttctggctgtgctggcactagccaggctggcaggctgcgtgggtacttctgtgattttcctctcaagtgcacgtggctttttcttgcactgtttcgtgtgtgtgctttatttcacaataaaactcttgaattaagtatgcatagaaactatttcttttttctctgggtggcaagattatgaaaaaattttcttacgcttttctatattttccaagtttgaatttcactgtaagcacctggctttgtacygccctttttctgttacacrgtcatcatttgcttgcttgttgtgggagcacttttgcacaggtctgcttggttastgaaagcatgtctccctttctaggaaggttgtgcaggaccagcrttccctgtgcaggcgccactgcgtttcctgcagattccgaccggcactgcaayggattccctgccggagctgaggtcaccaacaggccgtcgccatggagacccctggtacttctcattcccctgcgcctggggctcacggacatcaacgaggcctacgtggagacgctgaaggtgggtcctgccgtgcggcgcttgccctgagtccccgtccccttctcccagttcttagtcactttcagcgcatcgtcgtcacgtggccatttgtgcagccggctctcgggggaggggtaaacaaccctggtttacaccgttgcccaaggggtgagtgggcgtgaggcacgtccatcagtaggcacgtgctgctttcgttctgcaagtgtcaaggcgagtgtcgaggatgaaagcatgaggcgcttgcagggggtcctyggaaccaggtgccactcctcggcctgacggggagccccgccccctcccgggtctccactgtgccccaggcatgcccaccccactcccccacagccctcttggcctgaggtcccttcggagggtgggttggcctgtgaggaagggacgtgtgggcagggcctggggatgggcagggctgtgtgaggagctccagccacaggctcccccatgtcatgaaagcaaaagggggcggggagcggtggctcatgactgtaatcccagcactttgggagggcaaagcgggcagatcacgaggtcaggagtctgagaccagcctggccaacatggtgaaaccccgtctctactaaaaatataaaaattagccgggcatggtggtgcgcgcctgtagtcccagctacacaggaggctgaggcaggagaatctcttgaacccaggaggcggagcttgcagtgacccgagatcatgccattgcactccatcctgggtgacagagtgagactccatctcaaatwaaaaaaaaaaaaaagcaagcagaagggaaaaccatcctttcttcaggtaactcaaattttagaccaaggagtcacatttgtatggaactgaaatgtggcttcctgttaaaattattcagttgtctgaacttggcccctccgtccagccttctgcccatcctgtggggtctcagctgcccccacacataggccccgtctccatcgcttctgccctgtcaggtcaaagcactcagcagggccacctcccgcacccctgctcacatctcctgccaggccccctcactcccggcctccccaaagcccacctctgacatgaagcttccctgagctgagcctgcagattgggtttcttgtgcctgtgggatgtcctgtggtctttcctggacagtaagctctttggtaccatgtcccctcctgtcccctcttgygtcacccagttgggcctcagcaggcccttggkycccctatggcagtgggtggggggaccgtctgctcccacctgggacctgtgctcagtcccccgcccctccacagcactgcttcatgatgccccagtccctgggcgtcatcggagggaagcccaacagcgcccactacttcatcggctacgttggtgagtccagggttcccaccgtgtccctgtgggcctgggccttttaagggcattccatgagcaggtaccacaccccaggtgaccacttgaggccactggtggaaaagcagcatgccctggggttcattttcagcctggtcgmgggcggcctcctgtgtgcccctttccctsatggtctggtgccctcggctccctccccacctcctgcccactgcttctcagtgtgatgtgggtgcagtgggtctgaaatgcggcctcctctgtccctttcctctgccggctcggccrcccacctgcccacctgcctcatcctcccaggtgaggagctcatctacctggacccccacaccacgcagccagccgtggagcccactgatggctgcttcatcccggacgagagcttccactgccagcacccgccgtgccgcatgagcatcgcggagcttgacccgtccatcgctgtggtacgtggcggccacctgagcacacaggcatttggtgctgaatgctgtttgggaatgacgaggaaaactttcggatttttgcgttttttttttcagcatgttgsgataagtactgtgttcacgtggttgggaatctgaagggtataagagccggaactgtgtccttgcaccctcacgtccctcccccaggcaccacctcctgtgcagccttcatggccttcgagtggcccagagagcgtgtgtctggatgtgagcgtgtgtgggcgcgtgctgagtgtgcatggatgagtgtgagccatggtgagtgtgtccccctcacacctacatttaaacacaygggcggcccctccacccacccctgcaccaccttcgtcacacccacatttaaacacgggcggcccctccacccacccactcctgcaccaccttttgttttccggaggctctgacttgacctctctgggggatttcctaagaaggagcttccctgtttttccattttgattacctagttgtgatttttggtgtgtgatttatgcagacctgcctgccctcaaatatatttgatggggaaagaggccaaaaaacccccctagaaatcatgaatgacggtgacatgctcagggaagcagttaaccgaatcgggggctctgttgtggatgctccgccccatttaggaggaagaaggcagatctgggcctgaaatgggacggtctctgagctgtggcgcagccccagagtgcacaccacgctccatgcacctcctgggcagggtggcagtagtggggaacatgggctggagctctgtggctcacactttttgtttgtttgtttgtttttgagacggagtctcactctgtcgcccaggctggagtgcagtggcrcgatctcggctcactgcaagctccgcctcccaggttcacgccattctcctgcytcagcctctggattagctgggactacaggcacccgccaccacgcctggctaattttctgtatttttaatagagacgggttttcactgtgttagccaggatggtcttgatctcctgacctcatgatccacccacctcggcctcccaaagtgctgggattacaggcgtgagccactgcgcgcagcctggcgcacacttcttaccagaacctagtcacgaattcctcgtckaactagaattaggtatgtttgttactgtaaacgcagcttggtggcttacagtgattgrcactctaacagtcaggtcaggctagagagccagccaccgcagacagaggagtggacgcgtgaacgttgagttgagaccaaaggggccacctggtgggataactgtcctcacccgtgaggaggaggaatgtcccctgtccccgggggagagtgctcctacaccagcgccgaggcggcagaatggtgtcttcaggggaagagagtgcccagtttgagcttctccccccatttcgtttctttttgtgttaacatctgcgcatctggcagcgttgagaattcctagtgactgtcattacaggcggcagctttaaggatgtgattgccggtgacccttggccggtcccctgtctcctggctcctcagcaggaggctccctgtgtcacggtgtccttgggcagttctcggtggcctttgccgccaagcttccagggagctgctgggcgaaggctgagacccagcggccctgcctcacagtcacagagagaagagctccccacttggccctaactcataacctgccccaatcccggaacactcggtgaggtttgagagatgcacaccacgtaacatctcgtgggcgaatcaaggcacagcaacgcagtggagcctgaggggagccgggcactggtgcaggggaccatgcacagggcaccctcggagctccrttccyggccacaggagccaaggcaggctggaatgtccagcacctgcatgctgggggcctctgctgcgccactggcagtgggaatggaagcccccacctcttagccgactgcagatgggggtgtcgtgttctgctcatcgtcatttcgttttaggggtttttctgtaagactgaagatgacttcartgattggtgccagcaagtcaaaaaggtttgtagccgccccacacccacagccgagctgagccacccagggagacaggcagyggggcgtgcaggggtcgaaggcctgcgtccaggtctcaggcagcctcactgggccgtggggagctttgtcccgcctggcacagctatgtagctgagcagggtggggcgtcctggattgcccatctggcaacacagttaacaaccctggggayggatgttgcgtgttgactttagaatgggatttccagtgtcctcatccgtctcctgttgagatgggggtggtgatggggtgctgagctacgccggcckagtgcgtgtggcccacccccctctgccgtggtggtcagactgtgctgtgtgttgatcaccacactgggttctcgtgtagcctttagtgtggagctgcctctgttttctcatcagtgagatgggatgacaggtttgtccgctggctgtggccggctggcccctttctcttggccgcagcaagcactggggtgaggctgcacctaacggccatgtctcactaacagctrtctctgctyggaggtgccctgcccatgtttgagctggtggagcwgcagccttcacatctggcctgccccgacgtcctgaacctgtccctaggtgagagctgccaagtccaggtggggtccctcggaggtacgatctgtgcccttgcttcyccagtcctggcccccttggttttgaccattaaggtgtgtgtgagcctgagccgtgagcacttggcagtggttcgcctgtgagaccaggtatggagtggagcgtcccctcctccaagcttgcgcccagcagcccaggacccacctcgtcttccccaccagcgctgcctgccsgggcgctgtggagctgggcgtgctaccatggagtcctcaggggtctggagcagacagaacatgcaggctctgtggtgacgcagtcctgggtgggggactggttcacttgggcaccactggccatgggtggcgtagacccctcggaccatggccagcgtgccgcaggagccggcctgggctcgtgcagtgaagtgagtggccgtgagcgcgtcctcctcatcyctgtctccctgtggraaactctacaaacaaggcaatggcaatggaaccactcctgatgaccacgagggtcagacgcgggacagaggcccctcaggcctgagattgtgccggccgccccctgccctcctcaccctgccctgctcctcttctctgctccctccccccatattcgcaggtctgcacaacccccggacctgttcacacccgcatggggacagctgtctgtgggctgcagagcaggcactgctcagtctgccccacgccaagggcccttractcacacccaggtggcccacccaagatgcctgatgcgctatgtcctgttccttctagattcttctgatgtagagcgactggaaagattcttcgactcagaagatgaagactttgaaatcctgtccctttgaaaatcctggggtcgggggtggcacctgtgagagcctggggctcctggtgccgctgcgtttcatccatcccgcccgctcgcctgccgagggctgcgccccgtgctgcctccccccagagggccacccgctgtgctcgtggactgaggctgcgctgcccgggaggccttactgcttggtgtcagactgcccagctcagagtgcccgtcagggcctgtgcatccgcacgcggagccgtctgttaggagcttccagagygttctctcgacactgccagccccgtgttagcacctgggcctcagtcccacttgctcccaggcgccggttctgtggttggtttggaattaaagtcctgtttgaagttgtcagacacagacatgaatttctkgggcgctccctgagtcagagtctcagaagacctgtgcaggctggcgtgagaggagcggcagccacacygcggccccacgcccaaggaytgggctgctctcgaggggggcgcgcccaccgctgtgtcctctctgcccagcctggcttaccaagggctacctcagtgggagatgaggttggaggaacgaaggcgaggttcctccttgctttggggagaaaagtattcaggaagtgggtgtgtgggaaacctgaagatggcgtgcacaggacacagcgtggkcggcctgggcagaagggcggctggctgtcctggagctgctgctggagcctgccctcagagtgtccctttccagtgctgtggcattctgtggcagcttccccaggtgtggtgacggggggggcggggcctccacctgtgacagycaggcttgagggtggacggcgtgcctctcccaggagccttccccatgtccttgccttgctgagaattgccctcccatgccgctgaggtgttaggtggtttagggccaaaaggggaaaaccacttgagtcttgtggtgtgtggtgggcagacaccacagggtggcatcacctggtggcatttccagaacctcagccccgattccagcacccaccaccgcctgaccctgtgtaacctgctgtcccgggtcccagagtgcactctgccccrctgctctgctgcctgtcctgggaaagtakctttgccccactaggaaatgtaaacaggagggcttggggagcgtgggcacttttctcatgagcagctactgcggcrttggcaggactcgctgctgctgctgctgcttgtgtaggtcggggagcyrgagatccccgaggacgcgcgccggacagtcggcactgaccggcccacctggtagcagaggacacccccagccccccaagcattgaagacatagtgtatttcctcgtatcctttctcccttgggtgtagttggggtggggaagcagggaaggctggtgcgatctccattccttgggctccrcgtccgagttcatggtgcgccgctgtgctgggagctgcagtggkaatgtgtgggacmccttgaccaaaggggagctttgtctcgtgtgttttgaaaaaggcttaatgaagagaatgttgttcattcttagtagtatagtttgcaattcttaatggcaaataataagtttcagtagaaaacaaaccttgtgtctattttttccttaagttctaattgaatgtgagttccagaaaaaaaataagtgaatgtttcagcccgttcacacgtaaaggatgtggctgcctgcgtggcgggctgtggggccctgagcaggtgtgtccccagccctggcagggggcctgtcctgcctgcagcctggctctctaccagccgtggcatcagccacctcatacaaccctagaaggaaaaagtgcaaggaaaataggattttaggaaagtaaaatggcggttcccatcttcagcaggaggaagtcacaggaagtgcctggagttgcagggtttgcctcgatttgaatcatagcaaagccttccccaagtgcgcagtgactgtcctggcctgtgggaggccatgcctggggcacagcagggggcttggtgaggacattgctcactctggccagtgcatccctgtgggcagccctggtataggtgtgaagggcccaaagccagaccggagggggccctgctgggtccccggtgaggtggctgaggacttgtggcctctccgatgctcgtattcgcttcttgtggctgctctaaaagatgatcacattcagtgcctggaacagcacagcctcttccagacccggagggcagacagccatgtcgtgctgtgggctctaggggagaacgttgctgtgcctttctagcttctggatgccagaaactgcttggctcatggctctttcctccaaccacacagccagcaacatggcatctctccagcttttgctgttggcatctcatttcctgactcggaccgcctgcctccctgttatgcggacccgtgatgggccaggcatggtggcgccagcctgtaatcccagcactttgggaggctaaggtggatcacttgagcccaggaaagagaggctgcagtgagtcaagattgcaccactgcactccagcctggatgacagagtgagacccagtcttaagacaacaaaaaaaggcccctgtgatgacactgggcccacctggatagtccaggaaagtctcatctgaaggttcctcacccaggcccatcccacagcccctggcaatgcttacccaagagtgaaatcctyttgttttgcctgggtttgtctcttggccacagaagggtgctgagacccacagctgctgcccccacagatgggggaccctgcctgccttctactccagcacactgtatgctgctgtctatgcggagtgtgctctgtgggacagattctgccaggagtgtcaaatcattccttctaagtgtcacttaaaaggggatgcaatgggctcggcatggtggctcatgcctgtactcccagcactttggggaggccaaggcaggtagatcacttgagcccaggagtttaagacaagcctggctggcaacatagcgaaatcctgtctccacaaaaaaattasccaggcacagtgaaggcctgtaggcctagctactcaggaggctgaagtaggaggatcacctgagcccaggaggtcaaggctgcagtgagccacgatcgtgccactgcactccagcctgggcgacagtgagaccctgtttccaaaaaaataaaaaataaaggataggatgagaagttaagctccagggttgcaatgaaaatagcagagttaacttaggtgagttcaggacgtaagctgtgatgacactcggatatagcctggctggacccagcgagcccagggcatggctgcaactgttcagacccacagtgggactccctcaactaggcaggaaccagggtccaggaaggccctactgggcccaatgaaggctcttctctcctgggatggaggttcccattcaaagccagctccgtcctcagtctaagaaaagtgaagcgttccacaaacaattttcaggtctttttttactagtgtctggaagacatttaggagaattccaactgattaccatttacagtgatcacaatgaaactgctcagagttatcactgaacttcagtaagaaaatacaacagagtgccatcaggacaggggagagggcaggagactgctccatcgctctgctcatgtccacactgccaaggtccccaccacgggggtccccagtgcaccccagctccggggcagaagaggcagcctgcagatctctgctgccgggaaagagctcctgaagttgtggggtctggactccgctggggacggggccttccgcgagtctcccacctctcgggggactgcagggagaggcgtctccagtgggcagccttgggtcacttccatagctcccccagcggcttctctgtggcagtgcggatggcgtcctcagagagcacgcggatgtcctcatggacagcttcgatgcttttggaagcatccaccatctgttcccaccggggtttcaggagaaaaagaggctcatcagcacgttccaggctrgtcacgggagcccacgcctgtaatcccagcactttgggaggcccacgagggaggactgcttgtacccaggagttcaagaccagcctgggctacacagggacaccccgtctctacaaaaaatgtggcaccactctactccagcctgggtgacacagtaacaccctgtttcaaaacaacaccatgtttcgttctgtcctctgtgctcgtggggatttcacacaggccgggctctggaaggccaacctgaacctcctggcacactgtggtgacctccgggataccccacacctttctctgaacctcaaccttgacaagtgtctacggtagtcacccggcattcctgccacagccctgatgcaggagaaacatgatgtgccaactgcccactcctgctttaagccgacctcagcctcgtgaccccaaccccgctgagtgcccacttgcaggagtgaggcacagcccacagcacagccaggcccacccagcccaccaggtcgaggtgactgtccctccagctcgcaagcggcgagtcggaagcacagagggcagaccctgccctgcccacgctcctgtggctcctgggccctgcctggaaggtgaggaagttccgcagcagaagccagacagcaggaccagtgcaacactgggcctgactcgtccttgcggggaagatgaatttggtcctaacagctgtgctgcacaatggcgtgaacggtgcgaggagcgtggggagggcataagcccgcaggacagccttctctccaccagaaggcaggcagtgagagggactcagaagcgctggcatctcagcggcatcccggcttctgctgtcgggtggcaccggacccttctcaagcttctgggacagcaaattctagaaaatctgccaggggcgtagaaggcacttggaagaatctaaccatttcatgaggtgtgaccgtgacggaaggagagtgactccctacacaagggccaccttcccagatgcctctcactggccactgtgcagccacacagctgtcgcccagaaccgcccaagatgagcctctccgggcggaatgactgccagagagaatgccgcactgccagaaaagggcactgctatcccacctgcgttccgggaaacgaaaagctgcgtgaccagcatcatctgcaggcacagccagtcgggctggggcgagaccctcggccctgctctggaggaggagctcaagggactgaagctcygcgggccgtggccacaagcgacagtgctggcgcccgacgtgccagaagccctggctgccgcctggaaagaggccacgtgggcagcggtgggcacgggcgactggagtctgggagagaggtaggggctgcggtcgggaggagcagaggcggccagcctgcgagtccactgggaggggagagtccagcgtcctgggagcagagccagacctgggactgctgagactgaaggaggcaggactgaagggagaggcagcacacagcaccctcctgaacttagatggccaggtgctgctgcagggcccatgcccagcgagaggccgcaccagaggacacagtggcaggaacaggctggcgctcgtgtctgaagaggggctgaggatgtggaggattgcgcagactctcacctgacccaccagacaaagcgccaaatgtcaacatttagcaaaactcatcgggttagaatttgctggcactggccgggcgcgatggctcatgcctataatcccagcactttgggaggccgaggtgggcagatcacctgaggtcaggagttggagaccagcctgaccaacgtggagaaaccccatctctacaaaaaaaattagccaggcatgatggcacgtgcctgtaatcccagctactcgggaggctgaggcaggagaatcacttgaacccaagaagcggaggttgcagtgagctgagatcgtgccattgcactccagcctgggttggcacccagagcaagattctgtctcaaaaaaaaaagaatttgctggcaccgagaacccctgaacgactactcccggggctccacatctgggaggaccagacggaaacggcagcagctttgctgacacgactgtgccagccaccacggtgtcatcctgagccacttctccacgcttcctagtgtgcaattctgggattctcaccttccagttcaaagtcgtgtctttcatgagctggtggaaacaccggagcgcccgctcctggaaagccccgttctcatagcgctcatggccaaacgctccccgcttggcakcatccgccagctgtaactggaggaacaggaccaggtcrggtttgggaaggcccacgtctggctgtttacaccartctagggaaaaattctgccaagaaagaacccaacagttaaagcttagtgtagtctaggtttttgtttcgaaagtcgtaaaaacaggaaaaaatgaggggacatttggtgaggtaccaagatgtgagactgtttatattgtggctcgtttaatttttagaacctcaaaygtgtcsgtttctccagtgtcacctttgtttttcctttgtaaacagacaagtggacagaaaagtaggtagatagaacggctgccagtccccgccacccacagcccaggccccatggaggccctcccagcgcagctacaggcctgctggccaggagcaaacagtctatgtacagaacccctggagacccccggcctagaacgcctgcagcacagagcagctgggtccggacacaggcacgaggtccttggcagtgtcttttctgccacacacacgccagggtctcctctcccgtggaagagcaggaagaagacaggcactcctagagcctgttatgtgccagcctagtctcatccactggcccttcttgccagggctgtgccagcaccctctctccctcccttactcatcccatctccctccaaatgctgtcctgtttccggaggaaaggtaggaccagaaaggctgtgactgcaggccacacatcacacaacagcacaatgagctgagggaaggcgtccacgagaacctcccacagagcctgcggctctgtcagctgatccgcacagcaggaagaagcaaaggaatcatgagtcttgtcctccttattatacaacgtaatacttcagaggggaaggactcaagctaacacatgaagaaatggcagaattaaaaagtgagggcgtggccgggcacggtggctcgcgcctgtaatcccagcactttgggaggctgaagcgggaggatcacttgggcccaagagttgttatagcgagctttgcttgttccactgtactccagcctgggcaacagagggagacgccctctttcaaaaaacgggggaaaaaagtactacaaatgaaccatctttgaaaatgcatctggaggctgggtgcagtggctcatgcctgtaatcctagcactttgggaggctgagatgagtggatcacttgaggtcaggagtttgagaccagcctggccaacatggtaaaaccccgtctctactaaaagtatgaaaattagctgggcacggtggtgcatgcctataat

SEQ ID NO: 8690 - DNA, 43922 bp, Homo sapiens
ggatagtaatactgatctttcagggtcttgggagaattcaatgctataggttacacgaacccacttggcatctgctgggcatgcatccatagagtattggcttttagaggcctccagagcaggaagggtagtccactgggtgggcttccatgaagattgaatgtccttccagcacagacagcttttccgtagctgttttcttcaccatgatgtgaacagaggaatcacagattcctgggcaaggcagaaaaaggggctctccaggatgaagatccctgctggggcaggaatctcatgtgtcccatgatgttgaaataatgaccccttgccaaaaaacaaaaaaaaaacaaaaccctagactaattaacagacagacaaaattcctcaaggcttggggtcctgtctggttctatctcccttccctatctctaccctcagcttggttcagattcctagaagtcaggggatcacactgggcaggctaggaaatgaacaatgttgcagcagaaagggtggcagggagctgcacttcctgaaacagatccatggtgaggactgtggaactcagctggggaggcttcttgacaatccgaagggtaccctctagctaagatggcactccaagagtagccttgaggtacccaatctgctccactgttaggagaaacaatgggtgaaatattaaaacaagtattgaaatagaaaagtataaagatgtagccagattttttaaatagtatgagtatctccaataaaccagaagtggagcagaagcataagaatgtgtgaggcaggcaagagatcctgtagccagagtcctaagaggatcccagaaaggcctggacatagcaggagaggctccatggaggagtatggacttgggagaaggctccatcttgatgggcccatggggatctactcctggctggttgctactccagcaggcttggttttatgaatttggggagaaatgggtctttactttcaaggtggccctgaggccccaggaactgaggacctcagagctagaggaaaccctgaagagcttctctctggggcaaggacagaaggtggggtgaagggtaggaagaggaagcacacagccctccccactctcaagtcttctcatctttccctggaaaatctgattaggtagttctgcatgggacctggaaatttgcattttaatgagagcccaattacgcttggtaagttccatacttctttaggctgcctctctgtgttttaccaactatgagtctctacaaaagtccctgggtgtggatgagccaatagtgcctggtcctcaggattcccaacatccctcccactttctccttcccatgcaatctgctacctctctattacttactgatcatagtcccgactctggaggatgcctcacaaagtccagactgtctaatcagggagaccgacatataagaagataaactgccctggtttgctccaggtgtttgtaaagggaggggcagactttctgtgggatctagagaagactttgtgcagtgggtgattttgagctggagctggcaggatgggaaggagtgtgtcaggcaaagagaatgagataggtagtccaagccaactgagatatgtgtgtaatcatagagagtagaggaagaaacagcagggtggcattcatttcaacttattgtattttgatttttatttaggtatagttcacataaagtacacaaatatttctgcccactatttcttcaaatttttctgttctccactgtccctcacttttttttgcctaggactccaattacacatatgttagaccattgatgttgtcccacaagtcactgggacttgttttttattattattattttccagcttgctgtcttcagtttgaatagttcctattgatatgttttcaagatcacagatcttttcttctatagtactaaatttgctgttaaacccagccagtgaatttttcatttcagatattaagtttttcatctctagaagtttgatttttcccacattacagtaacatttttattatttaagcatattttaagtaactgttttaaagtccttgtctacaaattccttaatctctattatgtctgagcctgtttatattgcttaatttttcttctggtcatgggtcacattttcctagtcctagaaggtctagcaatttttaattggatgctggacatcataatattacaattttgttgtcttcctttacagtgtttgacatttgttttaacaggcaatacgttacttacagatctgtttgagcttgtcaaggcatgtttttaaactttgttagggtgggtctagtgcagctttaattcaaagttagtttagccctaatgccaagatgtgacacttctgggtctctactgaatgttccaggtctctccactttgggtgcataaccttaatatatcctatgctttgtgaactctggaaattattttgcttataccttcacagtaggtttattttttcgtgtgtgtgtgtgtgtgtgtgtgtgtgtgtgtgtgtgtgtggaccagccatgtggaatttcactttatgcatgcagagcttagtacttagctttggacttaaagagacccctatgaacatttctaaagctctcctctagtacttcactgcacaaattatagcttcctcagttttctcaaactctaatgtctgtctcctaagctcagcaagcctcccatgccctccttgggttttcttccacacgtccagaaagtatccttaggcagaaaattgggacaattgtagagcttatctcattttttaccttccctgcctgttctctaatgtctgaattgttatatgtatttttcgagtatctcaatagtgtcataaattttgtctagttttctgtttacaacagtttgcaaccaatatcagttactttgttttggccaaaagtgtaagtcaactcaaactttacatatatacctgtgtaactttaccttaagtagctacaggactttccatcaccctgagttccccttgcttattaccagtcaggattactcttcaaagataaatggattatttcattttatttcaattcatttattcttttagcaaccacttactgaaccatgagtattggccaaagagtgggtgcacaagtagacaaaattaaggtagacaggatccctgattcatgaattgttcagtcacacaaataaatgtgaaactatgacagtgataagtgtttcactgagaagttgatggtactataaaaatagctgctgggagaaagttttcttatttcagtggtcaaagagagtttccttgaggaaatcacacaaactagggcctaaataatgaataaaaattaattaggggaaaagtcagatgaagagagttggaaggatattccaggagtaggaaacaacaaatatcacatgtgagcataaaaaaaaaatcagcagaatgggctaacatggatgtcaagggcaaggggcttcatgatctgtgatgaacttagaggagcccgcagaggccaggcaatgcaagttaagacttcagtgtttactttgggaaacgggaggcaattgagacattttaaatactaagtgacacagtcaggtttgagttttaaaagactattctagctgtcatgtgcagagtgaattggaggagcaggacagggtatgcagagagagctgttaggaagctctgtggtagcccaggcaagacacaatgacagcccaactagcctgctagagtggaggcagagaaaagtggatggacttgagcaacattcaggaggtaaagttgacaaaactgggcataagttgacatgaagaagaaggaagtgcaaggatgcccctcctaggctcaactaaccaggtgaatggtggacccagtgacagaaatgttgaaaagaggtttcggttgtggctgttgctgggagatggttcttgggaaggagtctgagttcactgtggttcatattgcatgtaaggtttatttgcaacatcaggaggagatatcaagtaggaagttagacatgtagagatcagaggaaaggattgagctggagaataaaaataatatatcatttgcatgtctagctggagaataaaaataatatatcatttgcatgtcttagtaatgaagtcatgggtgtcgtggcatgagatcagctggagggagaggagagattaaagtgaggagagagctacaaccaagtaagcaagtgtcagggctcaccaaccatgcaaggacagggcaggagaagaggaacctgcaaaggtgggtaaggaggaggtgcagagagatcgggaatgtggtgtcactgagccagagggaaggactggatcagagcatggtcttcagtgtcaaatgcagctgggaagtcaaataagatgagaacctagacacattagttggcttttagtagcatctgggtcacatttttgtggatacagaagccaggctggagtggaccagtgagtgagttggaggtaaggccacagagaccatgaatacacagctcttgaaaatttgggccacaaggggaggagtattgaaatagggcagctgctagaagcaaatgagagggtgaaaggagtgtttttgttgttgtgtcgttgttggtttctttgtcttaacgagcaagacttgaacagtttccaaactaacagcaaggatcagcttgagagggagtgtttaagtgcagaaaagagaggtggaagggtcctgagatggagagaagagatactttctaaggcccaggaagggggactggacctcaaaggagggccgatcctctgctttattggtggagtggaggtgtaggggagagagaggggcgactgggaaagtagggataggcagagaggatgccctttgagggaagttgagacaattccttttcataggatctctcttttatgtgagataggaggcaaggttgtctgctcagtgtgtgtgtgtgtgtgtgtgtgtgtatgtgtgtgtgtgtgtgcacatgtaggcacacatgcatatgtagcacacatgtagcagggtgggcatccattccaccctggaataaaaaggttaaggacatggaaaaggtgaagcttttccctgaaaatgggagagtgagctgatgagttacatgttgccgggtggataaaggctggtggttgggaacccacagtggacgaggctgccttgcagaacccctcttccagcagcacttggcagggaaggagcagacaggtaggttctaccacacatggagccttgccacagggctgggacatgaagacacaggcctgggggtgaagcacagtagattaaaatgaagcccttgacacccaagctggataaagaggcaaacgaagataggggatggggtggaattgaggaatgcaaacagctgggtcctcaaagatgcagctggggaggtgagtcagggcccaataaataaagctcttgaatgtcaggggcttgagcattttttctgagctcaatggggagccattgaggaattcgaggygaggtgagtgatacaccagatcagcatctggaaaggtcaccctgtctgcagggtggaggagcgcttggagatgggagtgagtgagagacaatggaaggtggaatgcaggctgtggtagctgggagggagaggtccagaagaggcaagccctggggacggcagagtgtccctgtcaccccaacgagcagtgccccctggccgaacgctcacataaacccgggccacagccaaaagaggggcaagggccttggcagggctgggagagagaaggggtggccacaggaggacaggagttcagggtggggagaagcaaagtggggagtgtggtggattttaagagctgactgaatgagctttggmcacggttttcccccaagagagcaatgacctgggggccctcagacatagatcccagactcagaagagagggccttttgagaccacctcttcctgaagtcttgtgaaaagcagagacttacctgaagtcacatggaggccagtaccatcgatgactcrggacayttactagccaactccccgacttcaggtgggtctcccytactcaacccaagcccaaaagaaacaagacttggggcgtggaggccgcgtctaataggccacctctgctgatgggaatgcrgattctttaggaggcacaacccagcrtcagtgggggccccctgagagccacctrccccactgccagcctccacagaaaggggcacagacccctggtgcttgtggcatcctggcgcctggcagcacccgcttcccctccatgtggctgatgtcctcttccttcaacctggtctcctctcccatggtcatgaatagccagggacaatcctattccttcaccctgattccaagggagggacacaaaatcataagagccacaagagagatgcagctttggtctcctgcccaccatgggctggatgccgcactgggcgttctgcagacgttgtctcgcccttcctcagaactgccctccttacagatcagggttgacgcaattcagaagatgaagcaattcgaggacaatgctgttctctaaacagaaagtactgctctgaggttaggaggggaaccatgatcttgcttaggctctgacttctgagtggccgtcaagatcaagtgctgccacttcaccattgaggctagagggcctgcagaccccaagttaacacagtagaccccagcttgtcacagggaagcctgcagatgccacactcttacacggcgtcctgaagagccccagtctgtcacagagctcatcaaataagagaaactcagggtttcagtcttatattccaggaggcctccttcatttcacctccctggttttttgttgttgttgctttttttttttttttttttttgagacagagtttcactcttgttgcccaggctggagtgcaatggcctgatctcgactcactgcaacttccgcctcccgggttcaagtgattctcctgtctcagcctccggagtagctgggactagaggtgcccgccaccaagcctggctaacttttgcatttttagtagagatggggttttgccacgttggccaggctggtctggaactcctgatctcaggtgatccacctgcctcgaaagtgctaggattacaggcgtgagccaccgcgcccagccaccaccccagttctgaggctggtgtwaatgcttctccatctcagggcagcmcaccaagtgtctactgagcccatacattgggcacttttccgtgctggtgggggaagggggaaggaggacaggaagcaggtgtgtagagcaatgaggaacacagacaggtgcagggatagtcttgagaattctctgctgctgaggttctctgcagccatcccccagtgggttccagggcacagaaccaagtccgcacatccctgcatggggccccctctctcggcagctggtctctcctgctccccagcccttcctgccggcttctgtggtgctgaaatctgtgtcagaaccttttctgttcctcaaagctgcctggctctggttccctctgggcccttgcacaggtggtcctcccagcctgaatctctctcttctctgcttttcccttttaccttgctaacatttttcaagtttcaatcagctgccacttccactggaagcctttcttgttatggaataggtgttcccaatgcctgtacttactcatcacacacacacacttcttgtgtctagtggtgtttgctaattgtctgtcttcccagtgggctccttaagaacaaggaccctgtctctctgtccctcattgtagccccaacacctcctatagtacctgcataataagcgtacatgttcaacccaatggaccaaatgcataaattacacattcaaagaacctagagattatctaaaggcaygcgtgtggtcagtgataatccatttggtaatagaagtcgagtaaatttcagaagtgccagaagagagaagggagagagtgatgaagtcacaacaggagaggggagccagggagggcctctcaagccggtaatagctaagtagagtcttccagagtgagaaacaagggcttttccattagcaaaggaaggtggcatccaggaggggcatttgtagcagagtatgctatgcctgagcaaggggtaggtgagtgggaagagaagggagggaggtggaccctgggctgttgctaytggtgttgactgcagaggctgcagataaattcactggccagcagtggggccgaagagaggggaagcagtcaactctcaaggccacatgtcatagggttcccagagaactctttaagagccaggaccctggctatctgtcccccattgtagccccaacacttctatctcccagtagatcgtctctgtgcagagtcaaattggtgaagtttcttaagaaaaacgttttgaggaagcatgaccagaggagggagatgagtccagaagccttcaggattgtccaggggagagataaggagggtttggaccaagggaaaagcaaagagatggagagaagctggggcttgcgatgtctcggggaggaagaacgatgtggggaaggagggtggccgaagagtgcagagtggccatcagtctcctgacttggaagatggcagcatgggtaaaatggccttcttggagaaagggagagatggggcactcagggtgggggcagctctggaggtcagttcagaacaggttggcaaagagtccagtaggtggatggatggatgcgaatgtaacttagaaagaaaattccactttagtcaaacaggcaaatacaaaactacacaacagaaatcgccaatcacataagtggaaatggagagaaatgaacagktttgcaaaagaattactcattcagtaaaagggttctttataaagttccatctaagttaaattatatctggtataataaaatgtgattcatttacatatttcatttccacagagaaattgttgggaatgtggctgtcacattatgcttggtctgacatagacaagtgactatgtgtggcaatatttttgtcgcttttggcaaaggttctcttatcttttccttctccatttctggcaaaataattgttcacttattgactgaattcttgttccagtgggtaaagtctttccttcacaatcaggagtaacacttcatgccggtgctcctaggagaagagttggtggcagccattcacactgtagtataaatgactaaagagcaaagtctgatgaagggcaagggggattatgaaggcactgtgcttgtgaaaaggatgatggggggaaggacatccaggtcatgggggggaaattataaaatttgtgagragagaaaagccttcagacggatgtgacctattggagcacacacctgctttgctttcccctctggctgagcacagacctcccctggccttgcattggattcatacaccttccttctctaaaatgaccacttactgttgtatctcagggtcaaygcacagggttggagctcctctgtaaagttgtgttaaaggaaatgaaatctttctgatgaaactgaacaggtgagggtgctgtaggcagggctggggagacctgtgagcagtacttgatagagttgctccaatcaaattctctctgacttcaacaaaacaacagtaaaagtaatgtattcagcgctcaccatgtgctgggtcccgtgctgcacaatttgtgccttatcacactcagtcctctgaacaactctgtaaggtaactatctctgttttacaaaggcraaacagagaagtccagagaggttacttgtccaccacgaatgtcagggttagattcaagcccagccctgttggggtttgaaattgctatcaggtcatttagtctgaagtctccttggggccaaagccatgtcagctgaggcttgaaggggaagcagacagatgtgactagaactgcarctcatcagcaactgactgccagtgctcagggcacctgamggagcacagcaaaaaggacagccttttgctccaggtttccactttttgagagatatgaacacattagtaaaatgcctgtgtctgggaacaggcagccagggtgagaaaataatcagatctacacaaaatggataaagaatgtgtggagggacctccaaagggtgagaaaccacttctggctgctaatgcaatctgggttcacatactcaattcttaaaaaataagtccatgaagcagaaacatcaaaaagcatgggatttggaatttgagacctgactttgaagcccacacagaacacagacaagtcaaycatgctatttggggtaagttgcacagactctctgtggcctgtttactcatttgcaagtaaaacagcaataataagatctacatcawgggaatattgtgaggctcagagattatgtgagagagctctgctaactggcctatctgtcctcattctgctgctgatggcgtgggggtgttaaagggtctctgattcagggcctggaccctcagtttaccmcctcaatggttcttacttctcttgcagacatattttgttccaaaatggcatcttacctttatggagtactctttgctgttggcctctgtgctccaatctactgtgtgtccccggycaatgcccccagtgcatacccccgcccttcctccacaaagagcayccctgcctcacaggtgtattccctcaacaccgactttgccttccgcctataccgcaggctggttttggagaccccgrgtcagaacatcttcttctcccctgtgagtgtctccacttccctggccatgctctcccttggggcccactcagtcaccaagaccsagattctccagggcctgggcttcaacctcacacacacaccagagtctgccatccaccagggcttccagcacctggttcactcactgactgttcycagcaaagacctgaccttgaagatgggaagtgccctcttcgtcmagaaggagctgcagctgcaggcaaatttcttgggcaatgtcaagaggctgtatgaagcagaagtcttttctacagatttctccaacccctccattgcccaggcraggatcaacagccatgtgaaaaagaagacccaagggaaggttgtagacataatccaaggccttgaccttctgacggccatggttctggtgaaycacattttctttaaaggtaaggatttgagaagttgatttttatttatttattttatgatgatgatgatgatttttgcttagtgaaatacacaagccagacaaaccctagactgcagggtggagaaatgggagggcctgagctctaattagctttgcaattagctggctgcaggacctaggatagctcatgtttaccagttacagtagggactcatttagttctctttgggtagacagattaagtgtcttgaggtgtgtttacatttgactcagtgggaaacccacaggaaaaatctggagactacttgagagaaaagatctcttgccaccagcagctgtcccactgccccttgaaagttttagaaagaaacatggaactctctgacaacccagtttaagaagcaaatccaagagtgtgaacactttcataggtgtagaaatgtagacaagctgatgtgcctgtcattcgtatcccttatatatatgaagtctccttcatatataactgcatatagatatagatatagatgtagatatatgttagagctttacagtttcactgtattgcagggaatgcacatcagctttaaagtcaaacaacttgaatttgaatttcacctctaccccatacttgctctatgatcctcagcatgtgtctctaaaagatttaccatgtgttgagtgcctgacctgtgccagtctctgtgctgactggatactctgatgataaagccaactttataggttgtgcttgagatagaagtgcctggcatctccaggcagagttttcatggatgccaccgtatcatccctcccttcctctgtccctctccttcccttccttcctccctcccttcatccacatgttcactcatttatccatgcactagtttatctgtccatccatccaggcatgcgcctaaccaaccagccagccatctatccattaacgtattcatctatccatctacccattcaccaagctatccatccatttgtccatccatcagttcatccatccatccatgcatccattcatccacctagctagccaaccacctgtccattaatctattcatgtatctatccaccctatatctgcccattcaccaaactatccacccatttatccatctgtcattcatccatgaatccatgcatacatccatctatccacccagacagccaaccatttatccattaacctgttcatccctccacccttcatctacccatccagcaaactatccacccatttatccatccatcagttcatccatctatccatccatccatccatccatccatccatgcrtccattcatccacctagctagccatctagctagccaaccacctatccactaatctattcatctatctatctctctatcggttcatccatccatccattcatccattaatccatctatccacccagccagccaaccatttatccattagctattcatctatccatccaccctccatctgccaggctatccacccatttatccatccatcctgcaaagaggaaagagaaggaaagaaaactggtatggtttgagcccttactaagttaccttcagtttatgttgttctatttaactaattctatttttaattgaaatayaattcacatgtcataaaattcaccattttattgctttttagtatattcacaagtttgggcaactactccgctgtgtaatatcagagcatttttttgtcacctcaaaaagaaacctcatacccactagaagtaattccccatttcagtttgctgtctttgcctcactaattgtactttgacataaagacttcttttctctctttgtgctagccaagtgggaraagccctttcaccytgaatatacaagaaagaacttcccattcctggtgggcgagcaggtcactgtgcawgtccccatgatgcaccagaaagagcagttcgcttttggggtggatacagagctgaactgctttgtgctgcagatggattacaagggagatgccgtggccttctttgtcctccctagcaagggcaagatgaggcaactggaacaggccttgtcagccagaacactgakaaagtggagccactcactccagaaaaggtgggcatctgtgtcaatctcctgggccctgaggcaggggatgcacacattcaaaratgagggagagawtgtgctaacagctgttggataatcacttctgcacagtgagcaccaactgyatgcaggacagagagcctggggctgtctatacatgttcacacttgaagttcactatcacctgatgaggagtcttagtaccactcattacacagatgaggaaatggaggctccaaggggtaagtgaattgcccaaggtcatgtagctgttatatgcttgcagagctggctctagaagcctatctgatattgaaatctatggaatgatcccataaaagctagcaaacaaaagcattggtggtcacatataagaaagaggataacaatattaccaaatccaaaggttggtgaaaaggtaaagtaacctgctacttacaaagtgcttagaagaattcctagaagatagtaagtgttcagtaaatgctagctaataatgttattattagttctgtaattagtatggtgagtayaaaaaatatggagaatagcaaaaagattaatcatgagataaaaaaggaatgtccamgttttatgttctgtctcttagcaatatatttttggcatcttagaatgattttagcagcgttccctggtgctcatagtctgggaagagagaaggaaggctgcagtgtaactggaattcaagaaagagattgrgcaatgccccacgggagggcaggaaaggtgctgaggagtttctgagcagagagagatcactttcagctgggactgagggacagcttcaaggaggcggtggggtttagctgcacatgtgggtagcatatgagcacacagaggcttggcaagggcagctttggtagaggacacagcactggcaaaaactcaaagttaaggatgaagagatgctgcagggtgtgtcagcgatttcttctcttctcaggctgcatctggggctggggataggaagaggaggtggcacagaatttcagggagggagggacagagtacagagcagcagatggagcacagagaaaacagggaaagaggacagtggcagggaaaagagagctgtccctggcatgaggggtcacaagacacctgtcagatgaggactgaaatgtgtccatccaatatttttgtgctttcgttgctgtgagtcactaagtacataaccttgggcaaagcactaaaagtaagctttaccgtctttaaaagggggaagtgttgttgaatgtgcctgggacaatgtctggcatataataaatgttcaggctggactcacgcctgtaatcctagcactttgggaagccgaggcgggtggattgcctgagctcaggagttcaagaccagcctgggcaacacggtgaaaccctgtctctactaaaatacaaaaaaattagccgggcatggccacgtacacctgtaatcccagctacttgggaggctgaggcaggagaaacacttgaacccacggggtggaggttgcagtgagcagagactgtgccattgcactccagcctgagcgacagagtgagactccatcttaaaaaaaagaagttcaacacatgtgggctgtttactcttggttcagggaaaccattgcagaggaaaaaaaatattgtgctaaattatcaggtggtgctgttcaatatagtagccgctaagccacctgcagtaatttacacttaagttaactgaaatgtagtaaaattaacattttagtttctcatttgcacaagccactgtttaagttgctcagtagccacacatggctaatggctaccgtactggagagtgcaggtctaggatcttcccagcatcacaggaagttctgctggactttgctgctctagggcattattagcagggcttgcatcaggaagtgctgctgaggaggtattccggacagtgagtgggtggttgatgagcttccattgctactggacgtctcctgttggtttctgccatagactcccttgctgactgctttttcacctctgcacccacttcactgggggctcgtctatctccttgcatgtttttagtgctggacctgctcagctgggaggcttatttcaagagcaacctgggtttcttggctaggatgtgttgacctttttagcagaaattagcagtggttggaggaagaacggagtctcccaaaatggcatctaggagcagagatgcagacaccatgggcttgtgacctcattgtttccttttccctactccacaggtggatagaggtgttcatccccagattttccatttctgcctcctacaatctggaaaccatcctcccgaagatgggcatccaaaatgyctttgacaaaaatgctgatttttctggaattgcaaagagagactccctgcaggtttctaaagtgagttgaatgaaaatatttgcaaaamagtccaagctggaagcacctgcagaattaatmacaygctcttatttcgttgataaggaarcagaggcctgaaaggtgaagtcagggtcttctgcggccagaagaaccgaatcttgcggcctatggccaccatccctctggcatgcagcattgttatccctcttcacacaaatgttccgaagccatcctcagcagtcaggtgctcccccatgcctgctgcaggagagcaagtgctccctcaggatctgacctcactttcttcctccctgaagtttaggccctcacacaagcatcacagtgtggctgcccataggtcatctgcaccctgtagatgtgttgtctggccttcagtgtgtaaggagagagagagggagagagagagagagagagagagagagagaggagttttaaagcatagtatattagatctaaaagtctagatttctgatcctcttgaaataaatcactaactctaattcccacatggcaacagtgagcctatgtgtccacatggcagccatcacaggagctgagctatgagtgccccttttaaccagacagtatcctccaggtaatgtgggcaccccatgctcttacaagaagtctccgtcagttaattggggttacctgcctagcccctgcacacatatgggttactgatccctgacctaaaattttattttgatagtggattataatagaagtgatcctggggccactgaaggggacctttgtcattggttttcagaaaatgttgagaggccccactggaatatgatgaacataatggacattttctygaggaaagtgtatctgtgagcctatgaaaaataatgcctgtagtcacaggagctcaagcctccctgaagcttagaaatccaggaactccaggttaagaatctcttccctagaagacaaagaagggatctaaccttagtcatatcaaacccatgtctgccatgcaagaactgcagcaattactactgctggcaagtccacaagcacttgctttgtatgatctctcttaatttacacaataaccttacggggcatatgcagttattattaccttttatagatcgggaacctgaagcacgcagcaycttaataattttgcaaccataagtggcagaactgagactcactccggtcttcctgctctgtgtttgtaaccatctcaatcccggtgtaaggaccaatgggccatagtcaacacccactgcaatgtattgagtaaacccaatgccaggcatttgaaccttgaatcctttcaaggtagacatcaccattccagggcaaaarcactcagtttagtttactcagttaagtaaaagtgtctccactagggcyactgatgtttgtttttcccttggcaggcaacccacaaggctgtgctggatgtcagtgaagagggcactgaggccacagcagctaccaccaccaagttcatagtccgatcgaaggatggyccctcttacttcactgtctccttcaataggaccttcctgatgatgattacaaataaagccacagacggtattctctttctagggaaagtggaaaatcccactaaatcctaggtgggaaatggcctgttaactgatggcacattgctaatgcacaagaaataacaaaccacatcmctctttctgttctgagggtgcatttgaccccagtggagctggattcgctggcagggatgccacttccaaggctcaatcaccaaaccatcaacagggaccccagtcacaagccaamacccattaaccccagtcagtgcccttttccacaaattctcccaggtaactagcttcatgggatgttgctgggttaccatatttccattccttggggctcccargaatggaaatacgccaacccaggttaggcacctctattgcagaattacaataacacattcaataaaactaaaatatgaattcatctgtcaacagagtcctaatctgaaaatgatttactagcgaactcgcgatggctgggctgtcatcccatgacatctcagaggctgcatgatttttttccttcatttattcagcaaaaatttattgaacacttaacatatgttaggagtaaatcagacagacaagattcctggcctgttaggcctaaatgggggagacagacccccctacagcaacaatgaaaccagacctataaacatgatcgtaagagcttatgataagtgccatgaaggcattgaacaggatgactgagagtgaggataggacaagggaggggtgtgagcatgaaggctgtgagtcaggaatgagtggcatgttggagagacagagcagggaccttgtggcatcatgtgtggcagatggaagaaatgagaacacagaggctcaaagaggtcggctggtggaggccattgttagccaaggagagagtctgggtttgtggggagcgccgggacaccggctgacgagggctaatgcgtgggctgtgaaggtctccccgggtgccgtggaccagtttcccatctcctcgcggctggctgccttcctgactccgatracgtcatgtgtgcacacacagccctccgggtgctcagccccttccctgcgggtttgtaacggcaatggtcccgcttccatactctgagtcctgagagcagcacaatgagcaatgggccacggttgcactacagcaaaggcagctcgtgtcctttgagtcmgacccaccgtccctccttccctcgttgcctgacaggctgtgctggcacctctatgtcacccycattaccgagggcatctctggcagcctcagtagagcccttgctcccatcagatccaaaggctcctcttctgggggccccggtgccccacacacctcggatgtgccagggrcctcatgtaggctttctcatgctattttataaggaaagaaacaaaacagaaaggagttatgctggagagctggcagaagtcccaggggaacctaaccccctggccctcacgctcccactttatttcacaaacagaacaagctgccactgcactccagcytgggcaacagagcaaggccctgtctcaaaacaacaaaaacaaacaaacaaacaaaaaacaaaaacagaagagctgacactcaaagagtaaaaacaactaacctaagccacagggccttcctgtgctgrcttagaacaaggaccaatggccagttatgaagggctcccgcaacgctgcctgaagcaaggtttgttttatacacaatgctcttccctcaggctctccattataaaggccacagtggagaagccaggcatccttcccaggaaggaacatacctgctcagacatggctccagcctcctgcagagtaggcaagaagatgtcctacagtagcacaaaggagatagtaggtgtgaagaagtgactaatgacacttgytgttcacaactagttttttccagaaactatgaggaaccccaagtagtcagcagtgggtgacggctgtcagcatccctccracagccttgcttccagtggcactttacagtgaaagcaagcttaggtggcaacctggtgcccactcagacttgcattggcaagcagatacaaaaacagccgtgggacattttctatcaacttgctgaggtcccagctctgttttttgaaatgccaatccttcgcatttgtttttaaatgtacctcacattttgttttgaaatcatttccactgggtatggtaaggtgacagacagagacatctgcctttgaaagaagagtttattactttgagcacccaagaggaaggggcctgccccaccacacagggccacacggggaagcaccggggctggtccagaggcacaggagcgagaggaacatgtggccagagactttagtactgcagtgtggggagtggttaggtgggacatccctattgggcaggaagtgaagtatagaggttgaggcttgtggttggagaatttgtaaaatgattcttgcatgcccatgaaaacacagagagggcatgaacataatcaactgtggccgttagtttgggccatcatttcaagatgcaaaatcatcagtcacagaatatcaagcatgagtattacagcatcgcatgaaagtttcactcaaggcaagagtggcaaatgcagacccatgggcacctgcacctccaccccatttagggaatcaggttcgacctcctaggagactttatgttttacaagtgccttgattggaaccactgtgccaacctcaatgaccttttattttaggatgagatttacttgtactattaaatcattctactttccaacaataatgttttattgtttttaattatgaataagatgcatgctctttgtaagaaatttggagaatacaaaaatctgcaaagaagaacttaaaagtcacttcaattttgtcatgaagagattctctcataaataaatactcatttaattctaagcttgttctacttacttgggagacatgggtgatcatgagccaatgatttcacttcacaggtttctcaaagtagtaagaagaaaggtctttctctgtttgtgaaatttccttccaattttcttttcgtcacctaagctggagtgcagtggcacaatcttggctcactgcaacctcttctgcttcccaggttcaagggattatccagcctcagcatcccaagtagctgaaattacaggcaccygccaccctgtcaggctaatttttatatttttagtagagacggggtttcaacatgttgtccaggctggtctagaactcctggcctcaagtgatccacctgccttggcctcccaaagtgctgggattacaggcatgagccaccgcacccagccccttccaatctttttattcatacacagatyatattttatttgaagcatcaacaaaatactggaatggtttggtgtggtagtgaaggcttggactgggggataggatccmagttctgagtgtggccccatccgtccacttaatgagcaagtgacttaacctcacagagcctcagtttcccatctacaaagtagggatgactgtgcctctctcacattcttgcggtgagggtgaccaataaagaacgtagcctaaaagaaaaaaaaaagagggggaaaagtggcagacggaaggcaagactagattgcagctcgcacttggacagagcactgtgtggacctttgaaaaaaatttcaaaggttcaacactcgcatcttcaccctttgcttcagaactaatgcaggaataaaccaggaaagccgagagaacccacaaaccctctgaaggaaggaggttgctcctgcagaacccaagagacagtccaaatattgtgagtgcccaagctgtgaaagtgggaaaggtggattktctgtcactgaacacacaccctcactggggcacctgaaggtctagatcatgggagaaggatctgaccttatctggagctgagtcaatttagagagccaagcaaaatataggggtagaggaagcagcaggaaaagcctgtgggttttccaccctcagaaagctatttcagagttgtctcatgggtgttcttggggagggctgccagaaatactgggaaaagaccacagggagaaggaaacccccagctgaaccttgtaacaattccaactgaacaggaagtctcctggccagaactcaagggagggcctgaatctggtgtgcagactccacaggcyrataggcgtgaaagccctacttgttctcataagtgggagkctggtagcctggggcaagttctcagcccttcctgcccactgcctataaacaaacttggtgctgtttggggggacatggtgggagtgagactggtcttttgggttgtgtgggagctgggtgaggcctgtaactgctggctttcccccacttccctgacaacttgcatgacacagcagaggcagccataattctcctgggaacagctccattgacctgggaaccacacccccattccccacagcagacatagcaagccctgcccaaagagagtctgagctcagacacacacagccctgcccccctccccccatggtccttccctacccattctggtagctgaagacaaagggcatatactcttgagagttctaaggccctacccacagcctggttcttcctatactaccacaactgatgctctctcaaaaagtgtcaccttctggcaggaggccaaccagcacaaaaatagtgcattaacaacaaaaactaaggatcttcacagaatccatttcacccccctgccatctccaccagaacaggtgctggtatccatggctgagagacctgcagatggttcacaccacaggactctatgcagacaatccccagtaccagcccagagcctggtagacctgctgggtgactagatccagataacaatcaccacagtttggctctcaggaagccacatccctaggaaaggggtgagagtactacatcaagggagcaccccatgggacaaacgaatctgaacagcagccttgagccctagatcttccctctgacataggctatccaaatgagaaggaagcagaaaaacagtgctggtaacatgacaaaacaaggttctttaacaccctcaaaaaatcacactagctcaccaccaaacaaaaaagaaatccctgatttacctgaaaaagaattcagaaggtcagttattaagctaatcaaggagccaccagagaaaggtgaagtccaatttaaggaaataaaaaaaatacataagaaatgaggggagaaatctttagtgaaggaatagcataaataaaaatcaaccctttaggaaataaaggagagcactgagagaaatgcaaaatgttctggaaagtttcaggaatagaatcaaagaagcagaagaaagaacttcagagctcaaagacaaagttttcaaaggaacccaatccaacaaagacaaagaaaaaagaataagaaaaaaagaacaaagcctccgagaagtttgagattatgttaagtgacaaaacctaagaataattggcattcctgaggaagaagagaaatctaaaagtttggaaaacatatttgggggaataattgtggaaaagttccctggtcttgctagagacctagacatccaaatacaagatgctcaaagaacacctgggaaattcatcacaaaaagatcatcatctgggcacactgtcttcaggttatctaaagccaagatgaaggaaagaatcttaagagctgtgaggcaaaatagtcaggtaagatatacaggaaaacctgtcagattaacagcagatttctcagtagaaaccctacagaacagactagaagggattggggctctgtcttcaacctccttaaacaaaacaattatcggctaagaattttgtatccagtgaaactaagcttcatacatgaaggaaagatacagtctttttcagacaaacaaatgctgaaagaattcaccactaccaagccagcactacaagaactgctaaaaggagctctaaatcttgaaacaaatcctggaaacacataaaaacagaccctctttaaaacataaatcctacaggacctataaaacaaaaatacaattaaaaaagcaaggtatacaggcagcaaatagcatgatgaatggaatactacctcacatctcaatactaatgttgaatggaaatggcctaaatgctcagcttaaaagatgcagaatggcagaatggataagaattcaccaaccaagtatctgctgccttcaagagactcacctagcacacaaggactcacataaatgtaaggtaaaggggtggaaatagacattctatgcaaatagacactaaaagcaaacagaagtggctatacttatatcagacaaaacaaacyttaaagcaacagcagttaaaaaagataaagagggacattatataatgataaaaggccttgtccaacacaaaaatattacagtcttaaatatatatgcacccaacactggagctcccaaatttataaaacaattactactagatctaagaaatgaggtagacagcaacacaataatagtgagggacttcaatattccactgacagcactacacaggtcaacaagacagaaagtcaacacagaaacaatgagtttaaaatatatcctggaacaaatggacttaacagatgtttacagaacattctacccaataaccacagaatatacattctatgcatcagcacatggaacattgtccaagataaaccatatgataggccacaaaacaagtatcaatgaatttaagaaaattgaaattatatcaattactttctcaaaccacagtggaatagaactggaaatcaactctaaaaggaaccttcaaaatcatgcaaatacatgaaaacaaaatgacctgctcctgaaggatcactgggtcaacaatgaaatcaagatggaaatttaaacattatttgaactgaactgtaatagtaacacaacttatcaaaacctctgggatacagcaaaggcagtgctaagaggaaagttcatgaccctaaatgcctacatcaaaaactctgaaagagcacaaataatctaaggtcacacctcaaggaactagggaaacaaggacaaaccaaacaaaaacccagtagaaaaaaaaggaaataaccaagatcagagcagaactgaatgaaattgaaacaacaacaacaaaatagcaaaagataaatgaaacaaaaagctggttcttggaaaaaataaaaaaagaagaccaygagcaagattaaccaagaagagagaaaatccaaataagctcaattagaaatgaaatgaaagattttaaaaccracaccacagaaatacaaaagatcattcaaggctactattaacacctttatgtgcataaactagaaaagctagaggagatggataatttcctggaaagatccaatcctcctagtttaaatcaggaaggattagataccctgaacagaccaataacaagcagtgagattgaaatggtaatttaaaaaattaccaaaaaaaaaaaaagtccaggaccagatggattcacagctgaattctaccagacatttaaggaaaaattggtaccaatcctgttgatactattcaacaagatagagaaagagggaatcctcactaaatcattctattaagccagtatcaccctaataccaaaaccaggaaaggacataacaacaacaacaacaaactacagaccaatatccctggtgaacatagatgcaaaaaatccttaacaaaatgctagctaacagaatccaacaacatattaaaaagataatccaatgatcaagtgggtttcataccaggcatgcagggatggttgtcaataaatgtaatacaccacataaagagagttaaaaacaaaaatcacatgatcatctcaatagatgcagaaaaagcatttgacaaaatccagcatcgctttatgattaaaaccctcagcaaaatcggcatataagggacacaccttaatgcaataaaaaccatctatgacaaacccacagctaacataatactgaatgggtgaaagttgaaagcattccctctgagaactggaacaagacaagaatgcccactctcaccacttctattcaacatagtactggaagtcctcgcaggagcaatcagacaagagaaagaaataaagggcatccaaatcagtaaagaggaagtcaaactgtcactgtttgttgatgaaatgatcatatacctagaaaaccctaaagactcctccaaaaatctcctggaactgataaattaattcagcaaagtttcaggatacaaaattaatgtacacaaatcaataagtctgctatacaccaacagtgaccaagctggggatcaaatcaagaaatcaacctcttttacaatagatgcaaaaaaataaaatatttaggaatatacctaaccaaggaggttaaagatctctacaaagaaaactacaaaacattgctgaaaaactcatagatgacacaaataaatagaaacacatcccgtgctcatagatgggtaggatcaatattgtgaaaatgaccataccacaaaaagcaatctacaaattcagagccaattcccatcaaaatcccaccatcattcttcacagaactggaaaaaaaatgctaaaattcatacggaaccaaaaaggagcctgcatagccaaagccagactaaaatgaggcatcacattacctaatttcaaactatactataaggccataatcaccaaaacagcatggtactggtataaaaataggcacatagaccaatggaacagaatagagaacccagaaataaacccaaatacttacagcccagttatcgtagacaaagcaaacaaaaacacaaagtgaggaaaagacaccccattcaacaaatggtgctgagataattgggaagccacatgtaggagaatgaaactggattctcatctctcaccttatacaaaaatcaactcaagatggatcaaggacttaaatctaagactggaaactataaaaattctagaagataacattggaaaaatccttctagacgttggcttaggcaaggatttcatgatcaagaactcaaaagcaaatggaataaaaacaaaggtaaacaggtgggacttaattaagctctttagagcttttgcacagcataaggaacagtcagcagagtaatcagacaacccacatagtgggagaaaatcttcacaatctatacatctgacaaaggactaatatccagagatattccaacaaattagcaagaaaaaacaaacaatcccatcaaaaagtgggctaaagatatgaatagacagttctcaaaagaaaacatacaaatggccaacaaatataagaaaaaatgctcaacattactaatgatcagggaaatgcaaatcaaaaccacagtgtgatatcaccttactcctgcaagaatggccataatmaaaaaataatagacgttggcgtggatgtggtgaaaagggaacatttctgcactgctggtgggaatgtaaactagtacaacccctatggaaaacggtgtgcagattccttaaagaactaaaagtagaactaccatttcatccagcaatcccagtactgggtatctacccagaggaaagaagtcattgtatgaaaaagatacttgcacacacatgtttacagcagcacaatctgcagttgcaagattgtggaaccaacccaaatacccatcaatcaatgagtggataaaaaaactgtggtgtatatatatatatgatggaatactactcagccataaaaaggaacgaattarttgcattcacakcagcctgggtggaccttgagactattattctaagtgaagtaactcaggaatggaaaaccaaacatcrtatgttctcactcataagtggagctaagctatgaggatgggaagacatgagaatgatacaatggacttcggggactcgagagaaagagtgggagcggggtaagggatgaaagactacatattgggttcagtgtatactgcttgggtgatgagtgcatcaaaatcttgcaaattaccactaaggaacttactcatgtaaccaaataccacctgttcccccaaaacctatggaaataaaaaagttagaaaaaaaaagaatacagcctggatcatacaaccacagacacaggcaacagccacaaccacaccaccacctgctgccagcatcagaatattctcaaagcgagcctgggcttaagtcacaatccaccatttgtttgtgggacaggcagtcagggcagatactttgaaaaaaaagagcccttcctgtttgctgtgcattgtcttcataccagttcccagaattgacctgacaaatattgaccaggttgctgtsatcttcaaacaccattttcctgtgggtagaggtgatgcagtgctgaagacctgggcccctgctcagtgcctttgctctgtaagtactttgcctgtgcccaaaatgagggcaggggcagaaactgcctcactcccttctctctctctctctctgtctctgtgtgtgtgtgtgtgtgtgtgtgtgtgtgtgtgtgtgtgtgtgtgtgtgtgtgtgtgtgttcctggctttgatggtaaggatgggagaagtaagtccctgaagaagaaatgcaaccatgtactccctctgagtcttaaaggagagacttcaggttttcaatctccttttatggaaaacttcaagaattttgagagaagaatcccaaatattcctgccagttagacaagaaaatgaaacaatacaacccaaagcacaatgacaatgatgctgcagcamatttactagaagctgtcctgtgaaaagggtgcttaggagctctggtctggaatctgagtcttgctcctgctctcaccaggcggcttgtcctaaccctgcatcagtcattccctgtgtacagtagggctaataatccctgtgctttgaggttctcataaggattaaattaaataagacaaagcaagtgtttctcaacaagggcactaccggtatttgggcaggaccactcttcattgaatgtgactattctgggtgyttcaagagctttcgggagcccagctgttccccaactaaactccagcagcatccctccaccaggcattgagctgatccaaaatgtcacctctatctcctttacacacagccctccccctgcctttgtcaggagccagtgttacaatgcatgtaatatcctatcacttcataaacccttaataagtgagaatattatacttcacgaatatagttcttaattttcctctgggatctttctggaagaggaattaagaaatgaattgggcatcattaccccaggcttgatagaaagggaaaaaaactgccattgagtactttcggcatgcctggagctttgtacwttgactgtcatataatcccgaaatggccccacacccaggaggtgggcaatatcatttgcattttgcaaagggagacactgagtttcagacagctgcttttgcacagtatgaggcagtgagttactgcacagccttgattccaaggtcccctcatttacaattgaatcccctttgggaaataggtcatttgcaagtcagggagtccctggggtgcagtggagtagaaaatggtgctgagttcaatgggataaaaagaataaaccagaaatagtttcattacaggcacttcattttacccaggggtagaacaatttttaaattgatttgcatcttccaaattttcgatcaaaagaaaatctgaagtgtatggaagctgtcattaagtgaacccacattgggagttcactggggctgtcattaagtgaacccacactgtgctggagaaagggaggacgtagccttgggggcgtgcccacagtactttgaccagcaaacgcatttcaacatagcagataatgagaccacattcgtccctcctgacacctggcctttgtcgtttggcaggctacttagggcaccaggggctacaaacccatttgcaaaaatataatctctctttcactgtcgcagcatttgcaattgatccagaagtcattggtttaggcaaaaaattattaaaggtgccagttaagacacaaatgttatcaggacaaactgatgaggagtgatagaggtggtcagcagtgcacagctgctgcgcaatgaatggaacggtggaagagttggatttgaagggagaagagaaggctgccttccttactgagaaaatcaagatttgggagggtcccagtagcaatgtggtcatgagtcttctgcaagaacctgaagatgggtgtagggtcgggggatgggactgaaagggaaaggagagcatggaacattgggcagggtgagtagagacaaccctgtttgcactgcagttccccctccagctcaggctgcattcccagccctaaaacaaggggtcttcctgctcctgtaccactttgatccctggaagtgraataaaggctcttctggcacattttgtaacttaaaataaagcacaaragatatcacattagtttgcaagggctatcttaataaatactacatgccaggcagcttaaacaacagaaatttttgactcacagttctggaggttagaagtccaagatcaaggggttgacagggttggtgccttctgaggctgtgaaggagaatctgctccaggctcctttcctagctttgcctctctcctagtttgctggccatctttcgctttcctcggcttgtagaagcatcaccctgatctctgccttcatcttcacatggcattctccctgtgtgttgtctgtgtccaaattgctccttcttgtaaggacatcagtcatattggattaggagcctgctctaatgacctcatcttaactgattacatctccaatgaccctatttccaaacaagatcatatctggagatactaggtgtctagacttcagcatatgaatttcgggcaggtacaattcagcacgtaacagacatcatccccacagccctgaggcaataaaaaaaatagagaggtttcagcctctgcttgtgacaagaggcatcccagatatcagaggctggacagagacatggagacagagttgctctctctcatcgctcctctaggctccatcagycctgctactttgctccccactcctgggctgtcttcatccacacatccagatggccgatcctcacatcgccactccagctaatgaacgactggaaagggggagggcactcttctttctcttggggcctgaccgaggctttgcacatcatcctttcctttccaatgggcaggatcatagtcaatagccatgctggatgtgagggaggcctaatatcactggcagtgtggccaggacatttgctccaagcatgttcttctcaatttgtcatcacatatatagctattgagtgtcacctaagctagtgtcaattaaacccttaactctaggaaatctgaaattttgtttacttctttccccactaaatactgaggacctagctacctcttggaccaggcagatacttgaaagttaatgaatgattgaaagaatgactggagagaagaaagaaaagggaaggaaggaagaaggagggaaggaaggaaggaaggaaggaaagaaagaaagaaagagaaagagaaagaaagaaagaaaaagaaagaaagaaagaaaaagaaagaaagagaaagaaagacagacagaaagaaagaaagaaagaaagaaagaaagaaagaaagaaagaaagaaagaaagaaagaaagaaagaaagagggagggaggctagactatggaagttgttttgctgttgtggtggtggttgtttttaaaacaggttctcactctgtcatccaggctggagtgcagtggtacaatcacagctcactgcagcctagaccccccaggcccaagcgattctcccacctcagcgactacaggaacatgccaccacacccagctaatttttaaaaacattttgtagagggggtctccctatgttgcccagcctggtctcaaactcctgggctcaagcgatcmtcccacctcagcctcccaaactgctgagattataggtgtgagccaacatgcctggccaggagttgccattgttgttgttgttattgctattgttttatagtccagagacttttactcaacaaaatgttagaaacctactatatgtaaagcagataaagggttgctaccttcactgaagcctcggaggaaagtgtccagaatcctaatcatccacagccttgtcttcttcagtgyccctcatggcagccctgtggggcacattgtgaaggtgggatttgtggtatgagcaayagagaatcatgacattatttatggagaaaagtgacatgttcaccctcttgttttcagagaatgggtccagcttggctttggctactgggaacagggatcctggcctctgtccactgtcagccccttcttgcccatggagataaaagtctgcaggggcctcaaccccccaggcatcagctctcagagccagcccccgcctaccacagaatcacacccaccattaccaattttgctttgcgtttgtataaagagctggcagcagacgcccccggaaacatcttcttctcgccagtgagcatctccaccaccctggccctgctctctcttggggcccaagctaacacctcagctctgatcctggagggcctgggattcaacctcacagaaacccctgaagccgacatccaccagggcttccggagcctcctccacaccctkgccctgcccagccccaaactcgaactaaaagtaggaaactccctgttcctagacaagcgactaaagyctcggcagcactatttggacagcatcaaggagctttatggagcttttgctttttctgccaacttcacagattctgttacaactgggaggcagattaatgactatttgagaaggcaaacatacgggcaagtcgtggactgcctcccggagttcagccaggacacgttcatggttcttgccaattacatcttcttcaaaggtgaggcttgctcwgacagaattattgccactgcctctgcaagtaaatgctcttacagcagagagccagctaataggttctttgctaaccacttggggaaatctatgaataagatagagctttcccacccttgcgtagccacagtccatgtgggttggaaataagtgcagaaaataactcagtgggatggtgatgctgtccttgcataggcattgggtgccacagagttcccaaaagagacacccatccagacttgagaagcttcctggtaaaacagccacccaagctaagacatgagagtgagtagtatccactcaggtgaagaagcttgggagaggtggggcaaagagggttcaggttgaaaaaactagcatatctaaaggtccagggaaaagagatatcattgcattttcaaagaactgaaacaaatttagttgggatagaacatcaaacacaatagcagaataataggaagaaaccaagagttgcaatgcagagggaaacarggccaggttgagggctcccagctttattcagggaaccttagaattgccgaagacttttaaatgtgaagtgacaggattacatatgttttaggaagctcaaactggctacaatttggaaggtggtttggaagggagaaagggtgagagaggagagacaagttgggaggttttcatagtggtccaaagtaagtagcacggtggccttgaataaagttgtggttttggaggtagaatcagcaatacttggtcattgattgggtgtgggtatgtaggacaggatgacccagttctcctgttatcaagaccagagtgcttgcaagaggtgtttgtggggacagatttataagaagtaagagagaagatactacatgtgtgaatgtaaccatgaccccaaaattctgcatttctaactacatcttaatgggcttttgcctaatgcatgacattttattaattgaattctttttcctttttcagtttgaagattagggagttggggtgggtgagtgaaggaaggagctcttgagcgtctctgtagaaggttgttgtctagaggcagtttggttgagaaggattaattcagtgtttgcaagcaatctgagctgctcagtcagtcatcccagctctgcaaattagtatgwttaaataaattcacaawgactcagtttgatcatccctgatatgggaataatacttatttcttattaatttttatgacaatttaaagagataatgtctaacacatggaaggtgcttagtagatggaaaaataccttttggcttgttagaagctaagttcctctgaaatggaacaaaatygtaggctgttagtgctcaaacactggtgacttgtcctagagactgagccaggcctaaattctggtctcctggctctgtaaccattccacattttttgccacatacttgcatagccaagaggaactgtggttttgtgtgtgtctacccagagttgctctcttgaaaagagttctcatggccttatgggttttgtgtcctaagccaagtggaagcaccctttcagtcgctaccagacccagaagcaggmaagtttctttgtggatgagaggacttctctccaggtccccatgatgcaccaaaaggaaatgcacagattcctctatgaccaggatttggcttgcaccgtcctccagatagaatacagaggaaatgccttggcgctgctggtcctccctgacccggggaaaatgaagcaggtggaggctgctctgcagccacagaccctgagaaaatggggccaattgctcctgcccaggtaagtgtcacagcagaaggatgctggctgaccttgctcaagaaccccagcaggtcttgatcaactccagctgcaaaagcccaacatccatctcgattaggctcaccatcttgtcctttactaactgtgtgatcttggcaattttctcacmttttttgggcctctactgtaaaactaagaacatgatacctgcctcattgggttgctcagtagattcattgagtttctacccatagagaatgtagaacttagactggtacgtggagcataagaagtgctcaccaggcattgactgttattatactttcctggtgtctgtctgatccccatctcctttcctcttgctttcctctctccccaccacaccctcccataacaattcactaacagaaggaacagaaggtggttaagtacagcaaaaaaaatcagatcagagacagtgaaaaataatcatggctgggtgcagcagctcagacctacaatcccagtgctttgggaggccaaggtgagaggattacttgaggccaggagtttragactagcttgggcaacatagcaagaccctgcctctatgcaaaatdaaaaaaaacatatatagctggacatgttgatgcatgcctatagtcccaactacmtgggaggatgaggaaagaggatcacctgagcccaggaatttgaggttacagtgagctatgattgtgccactgcactccagtctgggcaacaaagctagatcctatctctaataaaaaattattattatcatyatattgttaaagggtgcttctaytttaattaaaacatgtttaaaaaattaaatattaagaacattgtaaacattaaagttcctgttttatgtgatctctaaactatttcccatctcacttgctttatggtttgtagttttatcacagcaacttcagctttttctagtttccctagacccccttcaccagctaataccttcttgggggtgcatcttcttttatggggtactctgagatgaaatctggtacttagttctacttactgcttgctgcataacaasccaccccaaaaccgaatgacttaagacaatcacttccttggttctatgggttaactgggctcagctgggcagttttcatgtgttggagtaggtggcagctggagctgaagccactgaactctcttcacttatgtgtctggtgcctgtgctgggctggctggaagagattaaggctggcaggcatctctctctgcatgtagtgtctccatgaggctagctcaggttcagcagatcagcatagttaatactggtatatggcagctagggtctccaagacagaatatttcaaaggcaggaaatgaaagctaccagtctggtaaggcctaggcccggaaatcagcacagtggcacttctgccacattgtattggtggcagagccaatgggtggttggagagccaatggctgggtggtgcagagcccacccagattcaaggggagggtgcatagatgccaccttttgacggtcatcttgaatccaccacaacctgggaggcactagccaccccacatatccaaaagtgacttctctcagcaccccattcacactgaggtaccagggatagagaaggcattttgtgtttgggcagagattaaaacaccaaataagaggcacgggccaaggggagaggccaggatttaagagattattcctgttgtccatgaagctccayggctctagtcagttgctaatttcagccccatagtccctggctcctttggggtgagtcttctccttgcccccatcacagaagggagtgccatagactcttctagaccagtagattttccctcagggagggtttggtttgacttcttcccactttgacattctaaaagcaaaactgacccaagttactcctctaaatctcagatattccttgtgccagagagttacaatatcttagtatccatttttaggggcttttagatataagaacttcagactctgccatgtttcactccattcagatgtgaggcaggttagcttgccaaggggaactgcacttcctggcacaccattcgtgtatgtattcwttcacagttgttaaacatccactgtgttttgggctctctgtcagacccctgccccactagactctattccaccccccagccaactggcgcgggtcttgcttcccacccaagtgctgcctatgggaaacttgtcaaatagccctagatgtcctcctacttcaattaggcatccagaccctcatattgcccaggagtcaaaccagccacgattctctaacctgaattcgattttctgaggcagaagtgttcaagttggttatgaactagtcatgctttcaggtgcctgggtagctgtcaaaccataattataaagaagaataaccccagagagaaagggcagatttgctgtggatccaaagaaatttctgaacttaacccagggaaatgtggcaatcagatggtaaagatgctccaaacgcagaagcaggagttcatttgtgccctatgcccaacacacatgatctcccatcagatcctcacaacagccccaaggagggggcatcaccatgccatttaacactagaggaacctgaagtggagatgggtgagagacaatggctgcttgtattaggggatgccaggaggtggatttaggacctagttcagaagctgagccaacagaacttgctgatgcatcagatacggaagtgggaagatgttgacagtatttaccttatgtggtcatgatttggattccatcagttcagccttgaaaaaacatagccaatatctgacacctagaaagccctctataaatgtgatgaagatgacaaagacaggtagctgtgcctggagtcctctcagatccagccacaagatattccaggaggtccaaagagaagggagctgtgggtatgggtagtggcatggtccgccatagtgaacagtgtcatgggaagactggttgcttctcacgctgggaaatgcctctctcccatggctcaggctgccracagacagagcaggagtgrcacatattaacaagagagcaccatttctctgtctgtttctctctccagtctgttggatttgcacttgccaaggttttcaatttctggaacatataacctggaagacatacttccccaaattggtctcaccaacatactcaacttagaagctgacttctcaggagtcactgggcagctcaacaaaaccatctccaaggtaaagtggtgaacatggatgtttgtgggcaggtgggggtaggtaggaggtttctcctttggcatgtgggacatttaaaagtcaagttccttgttctttgtcctgtgcagactatttaataccacagtctttaaggcatctcttcatgggcttttccttctctacctccccttccttaggtcccttctattcttcatggcaggaatacagtgtcttccccttgaaggcccccaaactgatgctgtcttcatctcctcttgtcctctaggtgtcacacaaggcgatggtggacatgagtgagaaggggaccgaggccggggctgcttcaggcctcctctcccagcccccatctctgaacaccatgtcagacccacatgcccacttcaacaggcctttcctcttgctcctttgggaggtcaccacccagagcttactcttcctgggaaaagttgtcaacccagttgcagggtaaccatggtgggaggccaggagttatcttatctcatcctggaccaaacagataggccagaaccagcctgcatcctggggctgctatgtggttcagttaatcagtgtgccaagattctaataaagttgaccttgggttctgtgaacactaaggagcaatccttacaagggaggaacagcttctagccactcattcacaattgtcccatatctggtgttagttgtgcttagaaagttgaagatgagaacgaccctcatgttacagcctcccaggagatgtccaccgctgctgccaccattgtagatatttgttgagcatcctttgggtaagggtcatagtgaaaaacacagggggcatcagcaggagtaagccagtctttcccttcacagtggccaatatgggctgtacagacaagagaggttgtcctaaaatgtcattgcccagacatcaggggctagatcccctcaagaggaggttggacctgtgtcagggctccaaattacagcccatgtagaaaagcaggtgtgcagatgggccggcgtaatcacgggtcaacctggagggaggtcaagttcaagcagcaagaacagcgtgtcaaagcccagggcaacacgaagaccaaagaaagcaggaaggcaaacatggccgggagggatgatggacatagggcagggtcagtggggtgaattgagggccatattgaattgcgatgcagcctccattagagatcgaaaggctactcttccatgtgtgcctctccaagaggcattcatttgaaagtagtggggaagcagaaagagatgcccagctgcatgtgtgtaccacttggatgacaatacccatcactacaatgaactccgtgcccagacacgcagcagggtaggatataggtggtgcatgtctaggaaggagccatcccagaaagtgctacagtggtggaaacccctgaccctactccaaggaggtgaggctcagatcctgaagaccaggtaagctttaaataaagagaaaagggtaggatagtctgggagagggcaggggagagatgcgatcggcaaaagcaatgggtaaagagaggaaaaggtatgccccaataaaatgagagaaaaccagctttgcagccatggaaagttcaggtagggtcatggtggaaggtagtgctagagaggtgttcagagataaaaggctggaggctttgggtccccgtggagtgagtgtgagcatggccttgtagacagtggagagtagctgtaggcctgtgggcagatgtggatgtggacaaagtagtgatggggaagtcatctgtcaattgggcagagataagaaggagtagggtgcggccagggtaaggcccagccgggatggcaccatgaggtccatttgaccactgaccatgctgcatgcagggctatcggagcacatgcatccactgcttcaacacagacttattaaacacctcctatgccaagcattgggaatgcagcagtgaacaaaacagataataggtcctgcctacatggggcttacattatagcagacaaaacccggcagtaaacaaaacaagtaagtaaaatatgtgctgtttgacaatagcaaggacaaggtctttgtggtcaagaatatgcccaggaaagtccctacagtgtacatgaaggggcagctggcccctgatggtgacaaagtggattgctcagtggcaaagctggatttaagcccaaggctgcaatgtatccacattcatccttcttgataaaagaaaactgcaactgaaagttccctccctgtcatgtcttctaagaaagtggcacttgattgagaccaaagtagtcagtggtctgaagatattcattaactgtcatggaggtatggaccaacccttcaaggcttctgtcttctgcacccagtgctgcatagggaatacactgttgagacaagtcttgtgttcactccatgttagacaccattataagcagttgacagatgtcaataaactttctatttccaacagtcatgagagggaggcactgctacatctttatcttacaggtggggaaactgaagcaaaatgtgctagcatgtgcagagcctggatttgaacccaggctgttcatctccacagcccacatgtttcatctctatgccacacttcttttgtgagcacaactcaaaagcccttcagccacgcctcattggctgccataccacaaggatccaactcccagggtcataggaagtgggagagggaagaagccacatgagcagtagcatctggggaagactttctagggaaagacccagaagcatggatggaaagttggtggtttaagaagcactgattgaggacagggatgtgccctttgttgtttatttctgtattctagtacagagactggcataggataagtaaaaaaaccttttctaccttaatgctgtgaggggaagttgtgtcacatggcagaattccatgacaaagactcagaggcaggaaagaaagcaccctggtgaaggacatgatataaaggtgcactaagttttgggagaaaacttagtgggagaggccccgctctactccaagctgtgtagacagcactctctctctctttggcctcttcccttcctttctccttgggaagccagttgaggcaggctccctggactctagtaacatcttacacccttcagctggctggacaaccttggacacattgctcaacccctctgtgcctcaagttcttctgcaaaatggaacatgcaaaccttgctttaaagaattgtggaaatcaaatgaatacataaatgtgaaacattaagcacttgaaatccactaggtgctcaatgaagcttccttctggccccatcttttggctcctccaaccgtcaagggtgctcttcaagggtgctctttcctcccacagagcagagttccgtaccaggtaatgccaaaatccccccagtggtcactggccacataactacctcccagcgaaaccatgaaggctgcacatcaaaacacaaatgtgttgatggagaggcctcaggggccttatctgggcactaaaagtgacatctgcaaaacagaaccattcttgctgcaggaacattagctatgacactgtggcactaagtgggggaacgctggcccagggatcagggctgaaattgcagaggctcacgtgaaggagagccacatgattttctctagaaaagcatcattgttagattgttcactgggtttcttctcctttttctccctaagataactccttcagtcatctgtgaattaggtaagagtctccctaagcgtacatttcagatgtatttacactccaaaccaaccttttaaccacctagaagaatggaccattttcaagataagtcaacagccatctaaaatttatattttcagagatcttgcgatgctctctgtggtggaactgaaccatctttgtaacgccatagagtcccaggtatatttattttgaccctggaatggaggtaaatggctttcaatgttgggactaatgccctggccagttacagccgatatgaacacacaggtccaagtaatgaaaatatcactagggacactggtgtctgtcactccacctcaaggttccatgtgtatcatagagaccatgaaaatattcataaaatttctattccctttattctggccatgaacagagctgagacctttaaagttttctatgtatgggtgggtctgtttctagactgtcatttacaattctattgaatgatttgtctttccttgtgtcaatactacgctgtcttatttaacctagctttataagtcttgatattatgtcaagtcctccagctttgtttatagaagtattttatttgcttatgttgttttgttttgctttcaatgtttgttttttatcctgcccactccaccaattctggttacagtggctggtgactctgtttctccagctgccccaccccttctcttcccacacttatataagcctcaagtcctatgttaaaactttttatttcacgaagtatttggagtgtctctgttttcctaacccatatgaaaacatctttgttctgccttcatgcttgaaggatattttcactgggcacacaattttagatagccagatgttctctttcagtgttataaagatgtcacccattttgactttcattatctgagttaaaaagttatctataattactattattatcctttgcaagtaatccacttttccttttggctgctttaacatttttctctttgtttttgtctttcaattgttttcaaatgatattcctaggtatagttttccatgtatgaatcctaattaatcttaatcttaattaatcctaattaatattagggttcatacaccttcctgaatatgtgacttgatgtctgttttggaaaatagatactatctctttaaaaattgcttctattccattttctcttctttctctgggacaatcaaacatatatcagacgtcttcatcatgtgtcatgtctccttcacacttttctgcattttctattcttttttctttccgtgtgtaatctggatgctttctgcatgcctatcttaaacttctagtcttttctgctatgtttgatctgcttttaaataaatctatcaaattcttaatttcagttcttttgatttttagtgctcgggtttttattttactctttttatgcatttttgttctctatgaaattctttatattttgttccatcttattacacagaatgatcaaggttgttttaaaccctgtgtttgataactccaatatctggatcacctgtgaatctgtacattctattctatgtttttctcttggtgtttaatcagtttttctgttacctggaatgcctggtcattttcactgaatgccacaaagtgtgtatcaaaaattatgtggctttgggtaatactatcttcctcaagaggagaatttattttcttctcaggcagatagagtataaaaagactactttgattcagccaaggatggatttcagtcctttgggggtctggtttatttcttttgggccttacccctataatgttgtctttgggagatgtcaactaagagcctgggctatttgtgagggctcctccccgttaacatgtttatataccaatttttgtctcttcccttctgtgaggctgctaaaatctctgctcttctagcaggtggcttttgcatgattatttgctgtctcattccrcacacgcatcacttatgaggcagaaaattaccttgaagggaaatttcatgcaggacattgtatctgcttcatcatgattatcttttatctagaaacttgatcccttgaatcctaactacgtgttgactctgaattccaatttttgtttctccagcccattgacactattaaaggctctaagccagcaacccccgatctttttgacaccagggactggtttcatgaaagacaatctttccacagactggtgctgcagggaatagtttcaggatgattcaagtacattacattaattgtgtactttatttctcttattacattgtaatatataatgaaatccttaaacaactcaccataatgtagtagtactagtgggagccctgagcttaatttcctgtaagtagacggtcccatccaggggtgatgggagacagtggcagatcatcaggcattagattctcataaggagcacataacctagatccctcacatgtgcagttcacaatagggttcacggtcccatgagaatctaatgccactgctgatataacaggaggtggagctcaggcagtaatgcgagcagtggggagctgctgtaaatacagatgaagctttgcttgctagcccgccgctcatctcctgttgtgaggaccagttcctaacaggccacggactggtaccagtccatggcctggggaactggggactcctgctctaagcgactgtattctgttcacctttatgcctcagacttaaaaccagcaaaagtcctagagtaaaaaggcagcagcaaatgtaagcctcacctcagtgctgttctcctctctctggaatctcctcccaattcttaacttatcgcattcctcattgtgctccagtaccttcagccatctaaattttat

SEQ ID NO: 8691 - DNA, 12976 bp, Homo sapiens
gtaaacgattgaatccaaacaaccagaagggaaagataagatggatgtttggtgcccttgtcaatctctgtgcttcatagctggtctaatgtgggcccttagttctcaccatgtacactctttagagatgtgatttgtgtctgtgtgatgcaggctggtctgttctccagcttccttgccttcttctccctggtgaaggtaaaatacataataaagctgatcctaaggctgatatctgacttgacgtgtgctctcttttctccaccatcaaacccctcattgtccttgtgacaactgtcttctcctttggtgggggaggggagtaatctgaaacaggaataaaacacagacctcaccggtgcataaaacagcagttctgaaagaggcttcctgaaggtcactgagaccaccccacccacaacatatcctaggttcacccacttgtgcacttcacacatgagaaaatccagcaaggggctaggacctgcccacactcaaaacctcaggtccaggttctttctactacagcatctttcctctctgatccttgctttccaaagggaaaggctgaaatggaaaggaggggagatgtgtggaagagggatcccaaatcaattcataacacctacaaacatagcatctgtgtcaaaggagagagcgaagcatgcctctgagattaatgcagactcgaggaccaaaactgtctgccctgccatctggccaggtttcaggtaggcctggggcctgggtaaccggcctgctgccccccacccatggaggaaacacaggcagtggccactggggtttgtgaacgggtggagagggcactgtactgacatgaaataaccacaggctgctccctcggcagtgccccgagctccgacctgagcccaaaggaagctatgccaaggaccagcttcctaggggggatgtagcttcttacccattctacaggtgccccctcccttctcaatcctcatgaggaagaggtggagggccgggacagcccctccttgtagggcgtgtagagctctatgtctcagtcatttggctaaactgagggtcactgagtctgtgggtgacatggaccaggccctgaactccatgcacattctctatggggattctaacagcagccttggggagttcctgtgctgcccatttgcttaggaacttgtcctaaagccagtaagtggtgaagtcaggatgctaacccaagtccctctgactccagaatggagctctcacttttgtaatgaaagtgctatggcatacagaagagatttccagaaactcattcattcatttatccacctaaaacatgctccctgatacctaccaggtgtcaggcaccatgccaggtactggagagacagtggtgaaccaggcagtcagtatccctgtgcagagttacgagctgtctcttctgcaggccacatgcaccaaggatacctttctgaaaacctcctggatatctcaagtccctgaacatctccagatgcctgaatcacagttctcttgcctccttgcctagtcgaaataggttttctcatccattttccaaccttggaataaaccagctgctccccagggccagcagctcccagagctccatcctgcggagatgtgccagagaggccttcctatcagtgaagcttctgttcacagactcttctccagcttggctcaagtccaagaaacatctttgttctccagcatcaaaggcatgcacagattggagtccragatcagacacccaggcattaaaggaagcacgaggctaatgaacagggagagtccagacttatcagagagaggggaaatctgctgattacaggggaggcctctacggttaggaaggggacaagtctgcagattgcagataggagagcaaacgccaagcagccagcaggccttcatctagctctgwcataggaacctccacacctcctcatcctcacagaggtctgccccagccactgcctgggccactgctgctgcagcctggtctcttaagacacagaccaggtccacagccacagaggccacagggacagctaggacacagcattcagacttccccagctgccgcttctgtgctgagcctttcaggaagtagggaggggccttaccaaggaaagccctggatgttaggggttctagctaacagttaactcaacatgagacaatagtggatctgtgggccccatatgccaagaggaaaaaatacaaacagacaggaattcacaggaggagctgtggattcactcaatcactcaaaatatttatggagaaactactatgccaagccagactctggaaacctgcgacagtgccaggaggtgggcaagcagagcagtggcctgaaagactttcacatcaggaagagttgaaaaatatttagtctacaaaagaaaatacccaagggagtgggacagctgaactcaaatattttaagtgcttttatgagggaggagtgagatttttgtgaagtgccaaagaacaaagttaggacccatgggcagaaatcatgaaattgggctcagtttaagaactttcttataatgagatctattggactgcgacaggagctgcctttagatgcactgtgtcccatgaactggaggtttgcaagccagtagatgacaaccagctcctcccaatccatcaaatactgtgactcctctaactgtaacttgtacgtggaaatgggacccaggggcagggagcctcccacgaagggagattcagaagacctgaccgcaagctcaggagacaggaagtttccctggcttccagaacactgctgggaggctcttcggggggcccaaacttctggggaccagcagaatgtgtgaccatggcttgaaactaaaagaaaggaggaagacaggtaagtcatgggaagaggctcccccagatttggggttttcttaatgtttttggacccacaaatgcttcagccctgagaagcaccctacagtaattcctcactgctttctaatctcgttcttcccagctgggtttagtgtgctcgctcccttttacatctcatttatttaccatccagataccctttctcttctgtaccaaagtgatccgcctgttcttccacctgacaacccatcgcagattcctttctgccttcaccttcctctctcccacccaggactctcccctgtttgtctcagccaaaccaggggtttcaacctgacctccaggaagccctccatggtttcagcctagctcctaagtactgcagcttgggctctgtgctgcagtggccgcaggggtctgcagccctctaccagctgcctgtatttgaatgacacatgtctcctgtcagcatgagagcccagatgacagctcctggggctggctgtgttcttgcctgacttcacagggcccatcacagtgaggtctgagacacctgtacggctggccaccagcatgccccctgagcagagacaaagcggggtgctggcttctagaccacctggacaatctcttttattgatagggtaaccagctcatcttgatttgcctggaactgtcccaattttagcactgaaagttctgaatcctgggaactccctcagtccccgacaaactgggatggttggttgccctaagcacctgtgtgtataagacatgatgctttgttccaggtgggggagcacagagggaaagcagatgaggccctccatgctggaggaacttatagcccaagggatttttctggaaaactgtaaacccaggaggcctagttcccactgcctgccccctccatagccacattctccatgagcaggggtgggggcagcaggggctggtgaggggtgatcaaatactagatcaatgagcaggttcccagcctaggcctgtttcagcatgaactggcaggtcttgaccaggagaagtggtatcgtgggggccaccacccctattcgacagcagatctggacttgtccactcctgctctccttctctcctacggacacctgcctcacatctgaaaatggttgaaagaaaataagtggccagctggcagggccttctcaactcaacctccctcatcacccggttcccaagccagcctcataacctgtctttcctcctttagaagccgctggggaccgtttctcttctcttcccaacagcaccacctgctggccatagaggcacttggccttctactaatcacacccagtctggcctgagttggagatggccgcacacactccggccgtcagtgctccatgtggagaagacaagagtacagagatgcagcatctaacagagtcagaggaaggctatatgtgcaagacagagttacactatttatagggtgggagcaacacgaataatggttcaggacataggctcaggaatcagacttctggaattcaaatctagactccaccacttctattgttcccttaaaacaaatttctcctatgtgagagtaagtgacacagaatctcctatgagccaagcactggagttacagcagcgaaccagatacacagaatccctgcctcccagagctcacatgagaaggaagacagacaaaaagcaactcagcaaatgcataaataagaaagtgaaaatgaagaaaatgaaacaaagtggtgaggagagaccagagaagaggggtgctctttagctcgggtagcgtggaaaggccgatctgagatggggatgtcggagtagcgacatgaacaataggaggagccatccatgtgggatcggggtaagtatcagcgcaaagagaacagcaggtacagggagtactgcaggtcagactgcccctggagccttaactcggatgctgcatttgaaggtagaccctggccaacttttagttcatccaaattaatgtgagaaaaagagcgaggtctctgggcaccttgtcacatgagctgtggctgaaggaagggggcgtttcatccagagatgaggagacttagagacacacagtggctgtcttcaggcctgtcaaatgtcaaagagagaggcagtggatatattctttgtgatcccaaggagaatagcatggatcagtgagttctgggcacagaaaagcagattctgctcatatcaggaataaaatggcccagcaaatgaaatgagctgctcatgaagtagtgatcccaccatccatgaaatatgcaagcagagaccaaataagtagctgagattataggaagtgtggatgcaatgcttttaatctttaattatcacctactcttgcacttgaattgcttataggttaccacaagattttgcttctctctgaatacagtaaaatagcctttgtcagccagtccctgaagggatgtccgccccagggttggggaacatcacagcaaggcaggagaaaactggctgttgggtacagaacacgcttcttgtcaaacccggagcagactctggcaaagatgaaaagcggaggtcctcacctccctttcatatgctccccttttctgtcccagcaccagaagatggaacttccttttccttacaatggtctaagaaaaaactagtctaagcaattagagaaaatatcctacaattcccaagtcctaaaagtttttatgttgcacatcctggtaataaaaatatttcagcctcaccaataaacatataaaaacggtgttcaacctctcattattcatcagagaaatgcaaatgaaaacctcaaagagataccacaacacaccgactggaggggataaaagtaagaagacagaatcacagtgtgggtgaggttgtgggagtgcaaattggtacaaccactttggaaaactctttgacggtcatgactaaagtagaatgtatacacagccaatgactgaacaattcctctcctaggcatctgccccgcatacggtcaccaaaactcaaacattagaatgttcattctagctctcatcaggcatccttgtgaaagtggcatcacctttaaaccctgcatggcaacccctgacacactgccaggctgcccagggaatacagggcaacctggaagtccaactacttccttcagatcatccaatttttyaatcattatctgaaatgtttcattgtagaagcagcaatgtgggctccaagtagatgcagcagatccacatgtccctctgagggaaagccatggtgccaatrggcaagaacaccatgatgtgcaaggccatccaagggcacctggaaaacaacccagctctggaaaaaytgttgcctcatatccagggaaatgtgggctttgcgttcaccaaggaagacctcactaagttcagggacatgctgctgaatagtaaggtgccagctgccacccatgctggtgccattgccccatgtgaagtcactgtcccaggccagaacaccggtctggagcctaagaagacctcctttttccaggctttaagcatcaccactgaaatcctgagtgatgtgcagctratcaagactggtgacaaagtgggagccagtgaagccacactgctgaacatgctgaatgaacatctctcccttctcctttgggatgattatccagcagctgtttgacagtagcagtatctacaaccctgaagtgcttgacatcacataggaaactgcattctcacctcctggagggtgtcygcaatgttgccrgtgtttgcctgcagattggttacccaactgttgcatcagtacctcattctaccatcaatgggtacaagcaagtcctggctttgtctgtggaaactgattgcaccttcccacttgctgaaaaggtcaaggccttcttggccgatccatctgcctttgtggctgctgcccctggggccactgccaccactgctgctcctgctgcagctccagccaaggctgaagccaagaagagttggaggagttggatgagamtatgggatttggcctatttgactaatcaccaaaaggcaaccaactcagccagctttatttgcaaaacaaagaaatgaaggcttacttctttcaaaaaaaaatgtttattctagtgttattcataatatccaagtatcagaaagaatacaaatacccatcaatgaataaataaacggtggtatattcagacaatggaattccatacagcaatgtatacaaatgatctacagctacacacagcaataaggatgaatctcacaaacataaagtaagtggccaaaaaaaagacacataaaaaagcattaggatgaaacatatgaaattgccatttatggaggtcaaaaactgttcatagggttcaacataaaacacgctgtatagttccatttatatcatttatgtacagtacaaaagctggccaaataaatctctgttgtagacagtaagaacgtggttgtgtgtgtgttggttgtagtagcgtggtcattggatgggagaagaaggaaggtttctgtgttgctggtaacattctatttttttatctgggggctgcttatctggttgtgttcagtttgtgaaaattcattgaggtggacatttacaatatatgcacttttctgaatgcatattttaataaagagttgaaagttctattggggttcatcatataatacatacatattatttagaagcaatagatatgtactgtcattctaacatcatgaaagttaaaagacaaacacaaaatacagacaattttaaaagaaaagataaaaatacataaagaaaaaattcaaattttttctttctgctcccaatgaatagttttatgcaccctcagtgaacaatcagctcttctggagattttttataatgaagtcctggattacgtaaatgctgcatgatctttggcaaatctcccagcctcagtttctgcatctgtaaaattgcactgatgatcacccacccatcctagatggctgtcctcaggatcgaatgaggtatttgtggaagtatttagtaatttgtaaaatgtgaagggttaatatgattattactattagcagatagttactattaacatagatttacatgatagtgaagccaattctatagtaaatagtttggatttcattaaaagtagctagagatttcaagaggagtgttccccatcactaggatggcaaaactatctgccaaaggtattgtagagtgattcctgcaccaggaagagagtggaaataataatattaaaagtgataataatggtgaatactatgtggcagatattttctaagcactttatgtatattagctgctattataaccgttataacaagcaaaagaaggaggtcatattaatatgactattttatagacaaaaaactaaggctcaaagaaattaacctacgcgagatctcagagataacaattgagatagcctagtttggatgctcttcacattaccctccaaagctgatgcgagcattcaaaatctattcccattcggcaaagttcagtctaatatcaaggcaaacttcctttcattaatctactactcagcaagtatttttgagcccctattacatgccaagctctatactgggtattgggtatgcaatgataaataagcaaacacagtccctgcactcagagcatatgagctagtaaaagaggcaatcaatataagaaatacacaaaaataaatacataattctaaattttgttacattcaacaaaagaaagttctaggttatataaaataatgaattggagaacctaatttagattagagatcaggaaaatcttccatgggaaaataaaatttaatctgaaactggagagatagcaggagttgtccaggtgacaaaaagaaaaaaattatagtgaaaacaaaagatggttctgatataggaaaagcctgattgttgtctcagacacaaagatagagagtgagagggactgtgtccccagacagggacaggaggtgtgtgggcaggagcagaccccacaagcctctgagaccacgtgacaggttttgacttttgccctaagagtgaagcattaaagatttttaagcagagagtgacaagattcaatttgcagattgtaaatattgctctagttaaagtgtggagaatggattagaggaagcaagcaagaggtgaagcgggagccactggggacaccatggctatagccaagtctctgtgcagcagcagccaccatttccagaagcagctgggaaagactgaaggaggaacaggtttgggtgcagtccaggtaagaagaccaggggctcagttttgaacctgtcaattttgagacgcatacagaataaccaagcagagatacaaagtaagcacttacatctatgagtcrggagcgcgggaaaaattcaggaatggagatctacacttgggagccatcatcgtaggggtagcattctagctttggggtgtatagatcatccagtgacagaatatagattaagaaaagaagggaacttaagaccatgccctgagaaacctcaacagctaaaggttgagaagagagagagcccttggcaaaagattaagaaggagtcaatgatttaagagaaaagtcaggaaggagagagtgtgcaaaatgctgaatgccactgaggatcaggaagtgcccacactgagtgacaacatggagagcaggcatgggggtgggagggtccagccaggctggtcacccagggattgctcaaatactggaacctcttcccactcacttctcttcttctaaggcacagtggtttgccattagatcctggtacatgggaataagtgagtgaatgaatgataaatgatctgaggacccaaaaggtttaacagcttgaccaagattatccggccagtaagtatcaatgccagagctgaaacccagctcatctgattccaatgcccatattcttggtttaaaaatacaagctttaacccaggggaaatacctttgatgacacactctctgtcatgtttaatatcatactttaaggactattatacttatctctaaaactgaatctatggcttaggagttcatcaaaaactagggtagggagtgagaggcatcccctaaggtcgcctatccaggggataatgcatgaaggaataacctttacactaaatgaatgtatagtttgggttacatccttgagaccctgtctcaactgacgagcatgtgagagtctggccactcgccctgtagggccagctcagaggggagcttggtgttctggagttgtcggtcaggggtgatggtggtgactgtggtatcgtgggggccaccaccgccattcatggttgaaagaaaagaggtggtcagctggcagggccttctcaactcaacctccctcatcacccggttcccaagccagcctcataaccagtcctccctcctttagaagccgctggggaccccttttctcttctcttcccaacagcaccacctgctggccatagaggcacttggccttctactaatcacacccagtctggcctgagttggagatggccgcacacactcgggtccagtcaatgctccatgtggagaagacaagagtacagagatgcagcatctaacagagtcagaggaaggctatatgtgcaagacagagttacattacttatagggtgggagcaacacgaataatggttcaggacataggctcaggaatcagacttctggaattcaaatctagactccaccacttctattgttcccttaaaacaaatttctcctatgtgagagtaagtgacacagaatctcctatgagccaagcactggagttacagcagcgaaccagatacacagaatccctgcctcccagagctcacatgaggaggaagacagacaaaaagcaactcagcaaatgcataaataagmaattgaagaaaatgaaacaaaatgaccagggaagaggggtgctctttagctcgggtaatgtggaaaggccgatctgaggtgagagcaacagaaatgatgggttacatgatggtggcaatggcagcgtgctggaggtgagaggaaatctgagggaacattttcttgaatgtgaattgactgacaaaagtgtcactgaacacattacctttgattcctaaatagccagaatgacaaagcctatctgtagattactcattgtgttctcattcatttattttttcattcaacaaatctttgttgagtagctactgtatgccaagctttcctttaggtgctggagatgtagcagtaaacagaccaaaagtgctgtttttgtggagtttacacttagaggacaccaaaagctcatttattcattcactgagctcctgctgagcacctaatgccaagcatgatgccagacactgatgggtcccagaccctaaacaatagggctatcttggggtgggcacattgtggccagggtgaatatgcacctgcatctgtttaggtttgttcacaggcataaacacacacctgcctgagcatgtatcccatcaaacctcagacaacatgtatatactgttcagatgtttttcaaaatgcatcgggaagaccccgaaggggtctcagtagaggctttttatttgattcaaagcttcaaaagattattccatctgcaaaatgtataaaggctggatgttggaggaagcatgaaatagggagaggaaggacctgctactagagttatggctaaaggtggtagatggcagcagtggagacaaagacaagagggtgacgctaagtgttttggaggaataactaacaggagtagcagggggactcaatgtgtggggtaaaggaggagaaagaaggcagaaatactcccaagtttatggcttaggccactaggtggatgcagagaggtgaggactaggagatatgtgggtacatgtctgaagctcagagatatctgggccaaaaatgtacatatttgagagctgtcatcacatagaaggtatttaaagatatgtgagtggctgagatcacccaaggagaagaagagagggccctaccgagctgaggactccacaagatctcaaggttggacagcgcagaaggagcctgtacagccagctgacaaagagcggtcagtgaaggaagagaaactaggagggtggagactggaaagacaagagaagacaggtgtccaagaaaggaaggaaaatcaatggagtcaaccaatactaactggtcaagaaatgcagagtggctggtgaccttgatgaggacagcctgagtggggacacagaggccagaacagaacagagtggactgaggagcaaagggaggtaccaagcagggcrgtctgtggggttcctggatgcagctggattggtttgctgctcaaagaaaatcccagctcagacctactctaggacagaagaggccttcatgaaagatgcctggctgcaggtgtccaggtgtgggaaggtgagtgggaggaggcaggactgagcagcacttccccaaaccaggagggaagccaacaccgaagcccaggcttccatttatagagtttccacaagtggacccggactactccaccctgttcacaaagcaacctcgcctgaacctttgacaccagaggctgagtcaggcccagatggcaaacacactttaagccctaatcagactttgcatgggtttactcagcccatgcctgcttctctgcccctaccatgtcctcctagaagagggagcacctcttccccgtcaccccccagagactcacctgcatgaggttcacacactgcactctctcacaccatataccacacacacacacgcacacacatacatacacaaagtcagtgtgatgattccagatgctggaaccatgcctccccttgccctttgccaaatgcctgccatgctggccacagaggcagaaggaaaatgacaattctgcccttttgtaatgcatgctactatttttgtccatcacaggttcctcaatttgaggcctaagtgttcctagacttcatccggtgttggaggaagcccttgctgccagggaagccccagtgtgaagacaggacatagcaaacctcaggga

SEQ ID NO: 8692 - DNA, 13119 bp, Homo sapiens
gctatattgcccaggctggtctcaaactcctgggctcaagtgatgctcccgccttggctttccaaagtgctgggattacaggtgtgagccactgtgtctggttgttctgtcttaaaacatgtatagaatgtagacttcctactacctctatactactaccctagtactagcctccatcttttcatgcctggcttgctgcaacagcgtcctacttgtctcactgcttctgcccttgccctgctacaatcttttctcaagacagcaatcagaatggtctttcaaaaacatttcagatcatatcattcctatgctcaaaatctcccaaaagttccccatttcatttgtgtcaaagtgaacaatctcatgaggtcttgtgtgatctggtctctcatttcctctctgacctcatttcctacctctcgctccctccctcagttccactccaaacaactcctggaacattccaggcataaagcagtttcagttcctctcctgattgttctgtctgccagaaatgttctttcactagatagccgcaagctcagttccttcatctttcaaatctttgctcaactgtcaccttctcaccgtacttaaaattgcaatccacttctgcttctaatcccctttccctgctcttttttctcccatactttgtatcatttcatataatattatatacttatttaatatgtttattatttactttatgtctctctccaatagaatggaagctctctgaatgcagggatttttgtctgttttatttacaaatgtatctgaggcatctagaacagtctagtacctggtaagcacccaatagatacttgctgaatgaatgaaaatctgttgtctgggtgctctgaggctgtttcccaggcaattctcacaattatacctgaggacacccctctgaggctctgtttgcactttgtcattctaatgggtcagaggcatatctaatcacaggaaaaataacattgcccaatataataatgagagaagatattcttttccaatggcagttgtgctcagacacattttaactctcctgcctcagggagcatttcctatatatgaacttcttccacagaaaggggaagactttgtatctttgtttttgtgggccatactgtttctattcctgatcttgttcacaggttatcataatccttaaactcttttaggtcttttgcactaagtttgaaatcctcttcaacaccacaggaatgctgctcctgagatctggatgctgaatagaatttctataagttctggaaaacgtgttggggtaggtggttaggaaatcttacagcaggattgttaaaaatccaagcctcgtaggatttcctcctacaaaggaactgctacagttctgaccactaacctgaaataacagaacaagtcaccaggagatgtgtgtacacaagggccctgaatcttcttggagtgaactcctcttcccctgcctatcatacatttaaatattaaatccaaatacatatttcttctctcaagaactgttcctttacaaaacctgtctataaagcctgcaaaaacaactaatcttcttaggttctttgtaaattctattgcctgcctttctcaatatcaaaacagacaaaaaaacaaaaataaaaccttgggcccccctagaatatgggatgactcatggtactctgctaggtcacatttacacacacacacagagatacatacacacacaaacacatacagatacatacacatacacacacacatgcacacatatacacatatatacacacacacatttttctctagaaaaatataccctttcctaattttccctagaaggggaaaagtatacatctattggcttttgatatgtcatttaaatttttagtaggttcccttttatatttcttcctcaaaaatgcctttttcttctattcttgtagtctgaattccaatttctgttcggtctctacttgcagtgtggtaagactatagtgcactctcagcacattgtgagtagtaacaagccaaaaaccaggggtcatgtccaggttcagatgctcatgtgggagaggtaaaatattgatatatagaggcaaaagtggagtaagggggaaggcaaaggctggagctgaagttttgaaagaaacataccttatttaatgctactgactgctcagaagtcctagcatgtttaatttgccagaacttcttaatatcaaattgctcttgtgtctgaaatcctggttctcttgaattctctttttttttgagacggagtctcgctctgtcacccaggctggagtccagtggcacgatctcggctcactgcaagctccgcctcccgggttcacgccattctcctgcctcagcctcccgagtagctgggactacaggcgcccgccaccacgcccggctaatttttttgtatttttagtagagacggggtttcaccgtgttagccaggatggtcttgatctcctgacctcgtgatccgcccgcctcccaaagtgctgggattacaggcttgagccaccgcacctggccggttctcttgaatcctttgttgtgtagtaatgaatagttttctatcttctttagtattaagaaatggcttttctgatcttctgagaaactaaaacattatttctaattttagatttcccctcacttctcaaggcctcaaacacaatatcctctaatgacattgtctttggggtgacccaaaattatcatttatttcttacttatgagcagagagtttgcagcttttacttgccttgtctcttttaatacctacagccaccccctgggagcagaggagggagtgtgtataaagtatcacatttccacagtttgccatttatttccacttaagctgattacaggttgtgtttacttttcgttattccacagcatctctttagctctgtttcaatggtaaatccctccaacgtgccagtctttctccctcaactggattcgatctgaaaagtaacttaataaaatcctaactgtagactccctctcccttggggtcaaactagaaccccactgaggaaggaactcctacaaacaaaaaagcaggagtagcccttcttgagctggcttgacattattgattctgcgtgggtgccaacatcccagtcatctcaaagaggagattttgtgaatgaaacaacatgaagaggtgaactgtcttttgagaacataagccagaggtagatgtcctgggaatgtgagtgctacagcactgggtaggtgaaaggagatgcctacttccacactcaaacagaacactgcacctcatgatttgctgtgcagtgggagtgggtggttgacctagaggctttgattcagacccacatcacaatttccctctagaatcttcttatttaataactgctgaccctgctataataggtctctgggggatacaccaattctctttcaatgttctggccaaagagtggacaaaaatcccttcccttgatttcccaagacttgggactctcaagatattttactaaatgacaatgaaaaacaaataaatttaaaaaattataaaaaaaataatatccattgcagagggtacaacagttacttaggaatgaggaatacaaagtattgtgaaaagtctgaagaattgacaaatatttgtggctggtttctaggaaatttctccttgctgagaatagctttatctggctacccagaaggtttaagtcccttccacagagtcagttcctaggagtcactcaggatgtggtcttggtgattgggcagaatatattgctataaagtctgagaaaagttttaggaaaagtgctgggctcagtgactcatgcctgtaatcccagctcttaaggaggcagaggtgagaggatagcttgagtccaggagttcgagacctgcctgggcaatatagtgagcactcattctcaaagaaaaaaaaacattttaagaaaagtttaaacatatttgtgttttttaaaggctaccttagatacaaaatcattgtcctgaaattttacagttggactgaggtggggtatagtatatctcttgggtaagcagagtatagatggcctgagaacaatttgttgctccttcctttgccacctgcatatgtgaggataacattcttttgcctgtatagaaatgaagtgtgcatttaattttcagtgtatgggtattcccctaggaatctctctagtcctagccatgatcacaatgtctgaatctaccataaccagccccctctcagacccatataccctgtcacattctctgtaagatactctccacagaatatgtctctagctctgctggcacctccctgggggtctttactagcttactcccaacttgccactccatggagcatacgttgctatacttcccaccctggactgcatcctgtatgccttgactctcaggaggtccagactatgggcatgataactagcaaccactatggcgagcaagattcccactgcaccaacagtggctctccacctgctctgggaaacattcttccttaggcactgggaatgagcacccttttcaggtaaaataccacccactaaatacaggggtgtcactatcttctcacaggcccatccataaaagagtagcataaagatagtaattaaattatttaacattttctgatatttttgttattattctaagtactttatacaattaatttatctgacattatttaaccttcaaaacaactctataaggcagttactattttattttattaaatttacaaaaataataatttttttatttaataaaatcccccattttatttactttttaattaattttatagagatgagatttcactctgttgcccaggatggtcttgaactgtctctattatcttctaatcttgacttttttccttatacgctacaatactccaatgaatattcttgttgattttttttttcacacctaagtgtttctattggatgtattttttgaaatggaatttttaggtgataaggcttacaaatttcaaatgtttaatagatagtgcctaaatccccttcaaaaatgtttgccaatttataaccccattatttgtgttccatttttgaaagatataaatatgtgtgcaaatcaactgctccgcatgggtagttccttacaatttctgtaatggaaaacatagagggaaaactacttgcagtttcagtgggagaaaaggttcccgtttcaagaaaagaaaatttcagtaggagaaaatattgtgaaaaacaaggtaattttctactttaagtttctgtcctatgggtataaaaaatagctggacattatcttcttcccaggctcttctcccctcttctccgtcaggctgcattgctggtcatttttggctcctgttggaagcaaactgctctaatgcctttggataagattttaaccaggaattatctttttttttttttttttttttttttttttgagacggagtctcgctctttcgcccaagctggagtacagtggcgctatctgggctcactgcaagctctgcctcccgggttcacgccattctcctgcctcagcctcccgagtagctgggactacctgccaccgcgcccggctaaattttttttgtattattagtagagacggggtttcaccgtgttagccaggatggtctcgatctcctgacctcgtgatccacccgccttggcctcccaaagtgctgagattacaggcgtgagccaccgcgcccggccgaccaggaattatcttaaacagaaaaagaatactctaaggaggggtataccggccagcagaacagtaacccctccccggggttttcacaaggacacaagctggtgtgtaatagacttatctataaagcagactcaactcctaactggaattgttcctgattggttagcagaaacagaattgaggactgacgacagctgcacaagaagatgaaaccatttccttcctcttttctaagcttgtctcttaaaacccactggacgttggcacagtgctgggatgactatggagacccaaatgtctcagaatgtatgtcccagaaacctgtggctgcttcaaccattgacagttttgctgctgctgggtgagtgagggtcattctgaaatggggcaatttcagacactcctactgcctggactccaggtaccagtgtggtaaggagcaggcctgggccctggaagcaggggatagattgaaagaggagagaggaccctgaattcttaagtgttccaatggttcctaaggtcagaactcagaggtagtttcatagtccctggaaagtccattctgcaccaaacattcatgtgtactttgtagtcatgaggaggaacaggaaatgagataaaggggacatatgaagtgaatacttttataaaagatcaactggaaacaggatcttgagatgggtcctggagaaggaagagcccaagctcacctccccagcatttcacatacgcagctaaatttgaagccgtgttctcctgctcgacrttgatccactctcttctcttttacagcttctgcagacagtcaagctggtgagtatgccctttgcttccttgtattgacagtgttgtatcctcataatatgatgctgtgtttgctggggcggcggrggggtatgtctattccactgaaaatcaagcttgggttcagcatgggcagttcccccattttagtggggtctgggatttgcttcttagatccactgaagacccaagggaatgaggccgctgcaagtacagatcttgaactacatctacaataggactcttgggtgcctgacctcccttgggagctcctttggcatccacagtcccttcagggttatttattccacacccctttccactctgcccctcagcagctcccccaaaggctgtgctgaaacttgagcccccgtggatcaacgtgctccaggaggactctgtgactctgacatgcyrgggggctcgcagccctgagagcgactccattcagtggttccacaatgggaatctcattcccacccacacgcagcccagctacaggttcaaggccaacaacaatgacagcggggagtacacgtgccagactggccagaccagcctcagcgaccctgtgcatctgactgtgctttccggtcagtggaggaaggccccagggtggacctgggagggccaggacggatgaaatctgtttacagacagaggtttgcaggaaagagtgggcgtggactgcttactgggaagcactgttgtgagttgctcattcattccccatttcacccacccyctttgcttagcatgcgtggtgggggaagggggaatttctaataattttctcagcatgtgttaggttgtttttgcctcagtcttgattgagcaagggggttacgaggccacaaacagctgagtgtgggagaagcagaaggaaatccctactttaaaaaactaccctcctcctgtggcaatgcggtaaagcagagaggttgggggaaatagacctctaaaggctctaaggcaggaggctgccagacaggtgtgtggaggtgggagtgtagaattcagtctggaagatgaggtcagaggtgaggggagggtgaagggtagatcaggcagaggctgataggctgttgcaactattttgacttttattcctgagtgagttgagatggctttaattaaaggagtcacgtgatctgatttagstttatgtaaacatctgacagtgttcagtttaatagagtctgtagagaaaatgcttctagatagtatttcttttttttttcccccaagtagctgggactccaggcacacaccaccatrccaagtgacttgtttttatttatttttatagagacagggtctcagtatgttgcccaggctggtcttcagctcctggcctcaagtgatcttccctcctcaggctctcaaagtattgggattataggcgtgagccaccaygcctggcttagatactgtttctacctgcttccaatgtctgaaaatataagcacatttctattgttgtttacttgagctgcactcttggtgcataaaccctggagatggtcacaggtaaacattcagtgttttagattctcctgttcaacactgaaagggtgatttgtttttgtggtcctttaaggctgctgctgtaccagagagatcctggctgtggagtcgctttctgttgatggtgctttactgaaggggaataaataaatattgagttgacctcaaaagctgcctaatgacatcatagctcctctctgtattggcttcccagagacagccgatagtaattctgactcttcttatgaaaatgtaaaaatatagataataaaaattgagggctgggtgtggtggctcatgcctgtaatcccagcactttgggaggctgaggcaggaggatcacctgaggttgggatttcgagaccagcctgaccaacatggagaaaccctgtttctactaaaaatacaaaattagccgggcatggtggcgcwtgcctgtaatcccagctactcgggagactgaggcaggagaattgcttgaacctgggaggtggaggttgyggtgagccaagatcacaccactgcactccagcctgggcaacaagagtgaaactctgtctcaaaaaaaaaaaaaaaaaaaaaaaaaattgagatctgaagcattgttagagagaaactacctagtcccacctatccattgtacaaagaaatgcaactgattagacccaagagctcagcagttaatggcacagccaaaatcgcaatcctgactttagtttctgttttatgccatctcagtaatggtacctggcctttcatatacagaatactttttttttttggccaggcacagtggctcatgcctgtaatcccagcactttgggaggacgaggtggatggatcacttgaggtcgggagttcgagaccagcctggccaacatggaaaaaccccatctctactaaaaatacaaaattagccrggcgtgatggcgcatgcctgtaatccagctactcaggaggctgagggaggaggattgcttgaacttgggaggtggagtttgcagtgagccgagatcgcgccattccactccagcctgggcaataagagcgaaactccatctcaaaaaaaaaaaaaagaaaaagaaaactgtttttttaaatgaatttttatttaaataagatcgaataaattatatttattcctatgatacagcaatttgattttcatctttattaagtctattgaaactttgttaatagatttgtcctccgaggtagctgaattttggaatctgattactctgccatcagtgaagggaaggaattgttgggagtgaggatgtttgtaggcaaaaaggaaaaagtgattttaaatttaaaatttttcttgaatgccccttttattcagagtcacaaatgaatactgaattcacctgtgtgaattcaagtcatrcctttttatttcttatgtggatggaagattttatgcagggtayagtatggtctgaatgtttctgtgcccccaaaattcataygatatgaattaatcaaatarcaacccccagggtgatggtattaggaggtgaggtctttgggtaggtgaytaggtcatgagggcagagcccttataaaagagggccgagggagctcaaaggcctcttccgccatgtgaggacacagtaagaagcctcagttctgtgaaccaagaagtaggctcttatcaaagaagctgtaagcaccttgatcttggactttccagcccccagaacagggagaaataaatttctgttgtttataaaccacccagtttatagcattttgttatagcagccagaacagactaagacagggtggatgagggatgattaaggctctattttttttttttttaaccagcaacagcatgtggaaaaaaggggggaagaaggctctacttctttgctaatacagttcaaggctgcccaccctcacttcccaaagcttgtacaaaatttaccattaaattagtaatccccagaccacaaaaactgacggcttcaggccctgtcgagtagcctctacagttactgaaatgcgctcatttctctactcaaacrtagtattttaaattcctcagaattgttttaaatatctgctctgcatctttgaaacctctgaaaacttctgcttttagaagtcccayagatataataccatatattgcctataagagaatgctcacatctgtcatgaagcatcttcatttctgtctgccagacatcatgtcaagttctgtgagtaacgtacctctgagactgaaaaacccttggaatctatccttacaactttttcttatcatatttrtgtctttcagaatggctggtgctccagacccctcacctggagttccaggagggagaaaccatcatgctgaggtgccacagctggaaggacaagcctctggtcaaggtcacattcttccagaatggaaaatcccagaaattctcccrtttggatcccaccttctccatcccacaagcaaaccacagtcacagtggtgattaccactgcacaggaaacataggctacacgctgttctcatccaagcctgtgaccatcactgtccaaggtatgsggagtctgccaagatgtagggaggggagaagaggggatggacaagggctgaggtcacatgggcctacatggaggtctgagaaagcccatagcagcaaaattgggcactggagcaaagaggagtggggtggaagcctggctaagtattgaccaacaagtaggggccagagcttggagccctcacgtcccaggtaataggtagtcaggctgttgtttcactttgaaatgtaggccccagactaaagatggcagtgaagcagagctccctcattgatgcagaggttccctaagctcctgggcattcctaagagctgaggtttgcctcgtttcttctcatggctcatgttatagccattcactccagaaagcctggcacgtcatggactgttcaaggctgtgctccatagagtaatgatgcctccagctatgcgaggctttgggcccaccctccgtactgtccccaggggmtaaggggaatccttccctctgctcstgcatgctcaccagtgtgctttcattcatttggtggagaaacctgggtagggaggaggcacaagtccagccacagaaaccctgtgccagtgaggctggggatgtggtgaatcttgcattggtgagtgactcagacacagaagagcttcaggtgacaagcactgggacatagcattggaggtgggaggtgggacagggagaatacaaacgttgtcattaaaatagtaaccccccatcctgccctaatgtctgtcttccctagtgcccagcatgggcagctcttcaccratggggatcattgtggctgtggtcattgcgactgctgtagcagccattgttgctgctgtagtggccttgatctactgcaggaaaaagcggatttcaggtttgtagctcctcccagtcccttttgttatcagtttccatttggcccagggcctaaccccagacattgccagaatcccgctcttagggctagatatgcattccgatctaggcccaccttttatttattagttcatttattagttcatcctcaacaagagcactaataggagtcacctcacagggttgccatggggatgaaagaggctgatgctcttacaccagtgcctggtaggcagtaacagcacacaaacagggctgttgccattctggaggaggtggtatgtgagggcagcgcttagctagggaaggaggactctccaggcactgggccaaggcagggactgaggctgggtggggcttatatgakgggggagtagatagggtactgcaagcctctgagaaagagaaataatcccactaacacctcacaaagcactttgcaattggttcatagccaacacctcagttactgatgataagtaaatacagagaaacagagagagagagaggcagactgtgagacacaggggtgtttttaaaaggcagagcaagcctcagacagatgccatggcgtggcctttctgacactcctgggcgtccccatgggtgagctgaattctgcctctggactagcccttttccaggtgggagcagcccctgagcaggggaactgggggtgggaggacaggaaacatctgccagagggaaggcctgagctggtcccatccaatcctggccctggtccttggtcctgaggactcaggccccacygcctaatcctgctaacctcctgtgtgtccctcccagctctcycaggakaccctgagtgcagggaaatgggagagaccctccctgagaaaccaggtgaatacagagttgtctcagggattcagtgatggctcaccagggctgccggctggacctgagccagcgagaaggggcttgtgcgagttcagctgggagccagggagggagcagcgatggggggatggccrgggctcaamtcgcttggtcaactctgagtctaatttctgggcctaaagaggacctcgctggagatgagaagagaaacaccagtcccagatacagaggagagggcggtgttcaaatttctaggaccaggaatctggtgatatttccagagcaagaaatcagagatactttggtctttctgtggagctttggcagagctggcagaggatggggttaggggctgtaagactgaggccaatcggacgtgggaggcaggagtctaaggggaaaggaggaggaggcctggaaacccctcaatttgctgaggaatctgcctctgtggagggatggggtggagtggccaggctcagctgtctgtggaacactaagaggaggtttgggcttgagaaaattctggggggctaggggcactagtgggctctactctgtgggcaaagctcggttccaatgcccatgcactcaaggttgactgaattttggcctggttctgcccccatcacacagtggagccctgagcaagtcagtctccctgatggggttcagtctcctcactgaggaaataagtgggtggcccagggtgacctctcaggccttctaggt

SEQ ID NO: 8693 - DNA, 13083 bp, Homo sapiens
ttagaagtagtggcatactgtatgttgtcttttatgtctgacttcttccacctatgtcatgcttttgaggctcattcatatggcacatgtaccaattttgtattcctttttattgcttaatagtaatttattgtatggatatactatattttgtctgtctagtcatcatctgatggacattaagttgtttgcatttttagcaattatgaataatgcttctataaatattcactttcaagtctttgtgtggacatatgtttcttctagggtagacatttaggggagaaattgctagatcatatggtaaatttatgtttaacttttaaacaaacttcccattttccataatggcagtactgcgatagtactttgaagctgcctactgcatctcctttaagaatatagaagtattgtgctaggtgctggcatataaagatgaacaagtcagtttctgcccataagcattatacagtctaatagccaaaataattatagatataattacaaagttgaggaaatgaagtcgcttccttttctgtctaactagtagagtctactggggttttacataattaagattgtctgaaaccaaaacagagaaagctaaaggcttcttcctttcagacacgtattaagtacttgatatatttctgacagaaatcagagctaaagatggccttctgccagaagttgagttcagctgcatgaaacagaaaatcccacataatgagagcttaaagaaataaaggattatttttctgtgatacaacttgaaacctaaaggtaagcaattcagggctgggactacctctctctaaagtcatctgagattcagaagtctttcaggtttgggctccacattcacaggatcaggcccttgtcttcacacttataaaatgagggatagagctccagcctttacatcatcattccaggcagtaaaaaggagaaacagtcaagagcagaagagtttgtgcctgttgaagtttgctggctgggttacttgaattgcctccctggaacttccatagaagacttcccttacatcactgtcaagtattggatcatgtagctacctggtcttcaagggaggctggcacattagtattgcagctggacatgctcttgccccagtaaagcaggagtccattggtgaggaagaagagaataggtattgtgtggacaacccacagccctgacttctaggagtaagtaatcacgcaagggaaagagtatgccaaagaagcctggtgcacaggaggtcttctgtagtccttaatttggaccctattcccctaaagctgaacttgtgacagagacttgggagcatgtaatttatttgagaggtgatcctgggaaacaggtctgagggcttagagagaatgagatggatacggagcaaaagccaattataagacacattatcaagcagttgcagtaggtgatggaggttcaggggatatctgggaagcatacacagcatctgccattgtccacctgcaggatgggggagctgaagaatgtatctattgcctctggccctcattagttgagcgttgcccctggggkcatttactcccccctcatttccaggttgaactttgtcagatgaggaatgccacacacacacacaccagggaagactctggggcagaatgtgttcgtcacccttaaagtggcaccctggcagtgtaagttgaatctgagctcccacggaactgggggagctgtccagcaaacggctgttgaaatcagaggtaagctgggtgcagggacacaggcatcagcagcatctgcccctcatgaaaagttcatatttataataaaatctaatcgttgtgttctaacatgactgctggccaaactgtcccccttttcgtggcatggatgtgacctctaattatgcaatattctgcatgtcatttttaaaacagctttgttgagatagcgtcaatataccatacaattcacctaaagtggacaattcaatggatttttagtgtattttagtattttcactaatgactaatcatattgagtcttttttcatgtgcttgttggacatgtgatatcttcctcggtgaaatgtctattcaaatcctttgcttccaatcattaaattgggcaatatgtctttttgttataatattaaattgtaaatgttctctatgtattccagatacatgtcccttatcagatatctgatttgtaattactttctcccattctttgtgttgtcttctcatttttgtggcatcttttaaaacacaaaagttgttaattttgaggaagtccaatttacttttttttttttttttttgagacagtgtctcgttcgctctgttgcccaggctggagtgcagtggtgcaatctcagctcactacaacctctgatacctgggttcaagcaattctcttgtctcagccactcgagtagctgggattataggcgtgcaccaccacacctggctaatttttgtattattagtagaggagacagggttttgccatgttggccaggctggtcttaaactcctgacctcaggtgatccacctgcctcagcctcccaaagtgctaggattacaggcatgagccaccatgcctggcccactttttttttctcttgttgcttgtgcttttgagagtggggaaggagtactgaaccctgtcagcttgtcagcaaggagaaagggtggtaaattagtgtatgaaatttaagaaaagctgtaaaaaatagttgacatttaagctggatcttgaagaataaggagggtataccagtcacaaaattgaggaagagcttttcaggcaaagagaccacctgggttcattatctcctagaataagaatctccttgttacatttattataactgattcaaaacagacacccccacatatgccaacaacatacggtaaacactgacagagactgtcatgtcctacaattgttattaataaagccaattcattcatgcaagattcagttaaaacgtaatgctgcatctgtgcaactcccccaggaaagtgggaagtagtgtttggagaagaccaaataaacactcatgagtgatgatgatacctctgaggacacagattttaagtactaggtcccagctgctctctttgaaggatgcacacgaccagagaatgaaagcaggaaaaggtggtcagtgctcagcacgtgccaagcacagagcaggaaaagacctagtagataatgaatggtccctgccttatagtctagctttacatgtatgactcatgcccttgaaaccacagactggatgtgaccctgagggtaagagaagttcccaaaaggattaagaatgtgtttttttccaacctagaagaatggtggcttggcatcagaaattaagtcgttctgttgaaaataaacagaagtggaaatgtatattcagggcaacttaaactcatgctcttgacaaaatatttttttaaaaaaagcaaataaacaaaagtatttctcatgcccctcagttcatagacagaaactcataccaacaggctttttttttattttagtaagaactgccaaatggtgaaactattcacaaacactagaaatgcatgagagtgtcctcccgatattcttacctgaattttgcatctttttatctcttgtcaatctagctgggaaaacgatattaaaatctcattttgactggcatttccccaacttcctagatggcttcacatcttttcatgtttattaaccatttgcatcttctcttcagtaaattattatttatatcctttgcccaattttcttaggggtaatttatctttttctaattaatgtgaaagtagtctttgtatgtaagagatagtaactttacctatagcaaatattttcattctgtttttcttttaacttagttcagggtgtttttccatactaaattttggattgctcatcttgcttaagatctttccaccccaaggatcctaagttttcttctatttccatatgcatatttttaatatttctcacacctacacacacatacatagttacatggagagatggatcattaattcacctagaatgtgctgtgtgtgtgtgtgtgtgtgtgtgtgtgtgtgtgtagggatgagaagactcagtgttttctgagttcatatgatctacatggggaatcagatctaacatggaccaagtgttaaaccatacttccaagaacaacactacattagtaggccacctgctaacttctgcctttcacattttccagcttaaaacatctccatcctccccattatgtaagaaagaagtacargtgtttctgactgctccctctcccatgatcccataacccatcagttctgaagctgcattatccaaccttctgaatctctctgaccaccctccaagtcttccaagtccccatggccactcccttgctccaggccaccatcatctcaccctgggtctttgcaacaccctctgccccggactccctggcctacatgctcagtctgtctaattcattctccaccctgcaaccaggaatatttctaaaatgcagaccccatctcattcctgccctacctatgtttcttccacagtccccattgctgtcaaggtactgtccaaattctcacatctggctgaggctgtccttcaggattcaggcacctctcaactttttaagaaactgtgcagcctcatttctcagattgtgtctcctatttccatgctctgaccagagcagactactttcagcactttcaaaagcccaagattctttttcagtggagctcaactgtgactatgccccagctcacctgtcaaaaattgcaaacacacttgttcaggtcttacacctgggtgattctgactccgcgggtcaaatgggatctccacatccacaatctgtgatgacttctatggccagggtgctctctgcctccaggctgcagacgtgtgattccctctgcctggagtcctcttctacctcctccagctccagcccccaccccaccacccaccccaaactggatatgacctcttcctccttgaagtcaaagcataggtgctccttcctccaggaactttgacagtccgggttagggctcttcctctttgcatccctggtttcctggactttcctgattcaagcatttattgattcctcttcttccaccccagactctgagttcggggaagcctgagatagtggctgttgtcttgctcaccactgtatttcctgcactcagcagagacctgacacatagtaggcgctcaataaatgtttgctaaacaacaacaacaaatgaatgaactaacaaataaacaaacaaatgaacagatgagtggatgcctgtggcagtttccatgacaaacacaaagggctaagccaagccagcaagcagacagccgtgcggcctgcagagggcactagtctgcttcttaatctccctgcagaatcctcagggccaggtacctgctgtcagtcagagaggtgcccgatgctcagtggtcattctgctgcgctgaagattaagtaggagttgtttgcccttggccaatatgaaaaacctgagtgttctcccttcacttctagcgacaagtaacacatcccctgtcttgccatgaaaagagctktaactgtagcagccggtggcaggttttctgttcccaggtggggaagtgaggagagacaaacagaggggtgagagggagacagaaggaagacagctggtaagagaccctatggtgtattttttctatgtaaacargataaaaactgctcctcctggaacagcaaagttctccctatgtctccaagctacaaacttgcatgctagctactaactagctactctccctctctctctctcttcccccttcgctctttctctctgtgtgtatgtctctctctctctctgtctcttcctccaccctctctcactatctgtctctctaccctccccatccttttattctagaggagaataaactctaaggccagattgaatgagcatccaaaagamgtatctggagggagattttgtctttcctgtgagcagcagcagcttcctacggaccctgctggagccccagctcggatcagcccttctgacagcaatgaatgcttcgtgctgcctgccctctgttcagccaacactgcctaatggctcggagcacctccaagcccctttcttcagcaaccagagcagcagcgccttctgtgagcaggtcttcatcaagcccgagrttttcctgtctctgggcatcgtcagtckgctggaaaacatcctggttatcctggccgtggtcaggaacggcaacctgcactccccgatgtacttcyttctctgcagcctggcggtggccgacatgctggtaagtgtgtccaatgccctggagaccatcatgatcgccatcgtccacagcgactacctgaccttcgaggaccagtttatccagcacatggacaacatcttcgactccatgatctgcatctccctggtggcctccatctgcaacctcctggccatcgccgtcgacaggtacgtcaccawcttttacgcgctccgctaccacagcatcatgaccgtgaggaaggccctcaccttgatcgtggccatctgggtctgctgcggcgtctgtggcgtggtgttcatcgtctactcggagagcaaaatggtcattgtgtgcctcatcaccatgttcttcgccatgatgctcctcatgggcaccctctacgtgcacatgttcctctttgcgcggctgcacgtcaagmgcatagcagcactgccacctgccgacggggtggccccacagcaacactcatgcatgaagggggcagtcaccatcaccattctcctgggcgtgttcatcttctgctgggcccccttcttcctccacctggtcctcatcatcacctgccccaccaacccctactgcatctgctacactgcccacttcaacacctacctggtcctcatcatgtgcaactccgtcatcgacccactcatctacgctttccggagcctggaattgcgcaacacctttagggagattctctgtggctgcaacggcatgaacttgggataggatgcagggccatggaaatgatcatcagtcgggtcacttttgactttccatccacgtgaggtgtttagaaagaaaaatatatatacttagaaaatataaaaatgtgttaacagccatgattgtacttgtcgtttgtttttaagtttacaaagccttttaaaggggaaaattggtgaacaacagattctctgaaaggattccaagatgggtaagtcacaaactctgatttcccaaatagtcactgggagaaatcagcgaaggcttctctgcatgctctctgcactcatttccaaacacccagggtgtgcgacgcctgtctgctcatctgctccacacccacgtcttcatgctccaggccagaccagactgaaggattctcatgaacaataagggtggttcagatctcttgcaagcaaacctgttacagctacgacctcctgctgccagctacacggagagatagctttgcacttataactccgtaggagactgagttctactctattattctatttacagttagacaattgtctctttgtgaaaggagcaatgctatgccgttttccccttttcttacccccatatcccttcagttgtccccacccccaaaggtagcatgaggatgtaacccacttctatttttctgttgttgtgttggtgtgtgttgttgttttgtttttatggattaaatctaagacaaccttcaaaactctaacgaaagagagaaagtgctttggacaatcagaatatacttgtgtacgtgtattttgataccttgctattttaaggtatagattaatctttttaaaataacttctttttttctatcatttacttttagcctttaaaacaagaaaggaaatcatgggttggggtacatgtatatacgtgtgtgtgtgtgtgtgtgtgtgtgtgtgtgtatcacaagaaattgctttactgtagcttaagatagtttgagaaaccgtagaaccactgtgtgactttcttgggagcccttgtttttgcttatagtaattgcatctctatcacaggacttcttcaatattatctatgaaagagaaagtttttttgttcttttccctttttgcttggcattgtgttaaagttgagtgaccctgttatcaatgtctatatcctatcaagtacaggaattcattcctgggagcaaagggtgagactggctgactagtgctcgcattgtcagatccttttctgcccaagataacttcaatttgtgctttctggctgtccccatatctccccctgtcacaaattcttatattaagctgtgtcttggggtgcaattgtgtgtttatcttgcactagcatatactggggttctttaatacttgaagattttctgctaatataagcaaaaccattcctttcttgctttggttatgatgtttggaaataataaaaagcttttatggctgctaaacgtgtgttacattgaaatacaccctggaatcattctggtgactcctgcacacggccatggtatgtttcactgcaattcagtgatgactttgtaagtggcataaacagctccattgatcacagtgctagtcttttctagggcaatgccttttagccaaactacaaaactctcccatttagtttccaaaaataccaggtttgtggttcccgggccactgtcgttctccattattttaatcaagacactaaattacaggactttccatggccgctcagtgggtaaatgtagagaatggggaatctaattacttgaaagtgatatgaatagctatagggattatgtcttttttctatgtaaacaagataaaaataacttacttttcactcttatatcagttttcacactatttcattttatcccattagcaaacctctaaaataggtgagtcattttacaaatgaagaaatttagccttggaggggtgatatggttgtccaggagcacccacctagttagggtcatggtatattctgcatcctggggctgatgtccttttgcaccaatatgctgctgccagcaggttttcatcatcaaaactagtccccctctcctccctgtatgttttagcttgcaggggcacttccaaactggaaggcccacgagcatcacctgggatcctgtgcaagtgcagaatctgattcggcaggtccaaggtagggactaagagtctgcatttctaactccgacaagctcctcggggacgtggctgctggttgggggtccccatcttaaagagcaagggcatagaggattttcaaatgagtattatgcgaagtaaaagtactcttctgcctagaatgctgaccccacgccagggactgtgctaagcacttcacaggcatttgctccttgtgataaccctaccaggtagataccatggttatcctgattttgcagatgagctatgtgaaactcggagaggttaaggagcttgtctataggaactcggccagcaagtagagatagggagattcaggctggccagcccccacccccaaatccaaccagtgtcctagcccctctcatgatgacacaggaacctttgaactgggacccaatgacttgggagccacgtgtcgccatgcagagagaacttgatgcatgtttctaccacacacaggtccagatgttcccagcagagtttccagagagatgtcataaaaatcaaaaggcacaattaattctttaacttgctataaattttccaaagtctgtgagtagccctggggagtgcatcaaagaggtaagttactaaagcatccgtttccctagtgaacaaccctgaacgctggggtgccactgtctcctccgcgaccactttctcagattctcaagtgggaactcaccagatgttttaagcggcaggacagtcatgtttgaaaatgcttaattgttggaagtaaaagcacaccatgattttagctcatctgttaattcatttatcgattttcacccccatccccaaggcagaatccctgcagtacttgattctctgagtcctgagaagttgttgcctgttgtccttatttaagatgaacttttgaatttaattttgaaatctttctatagaggctgggtgctaaaacatacgctagcctctctggctgaaaacattttttaattcacgctcacctccactaaaatccattctccacatagcagctagtgcaattatttaaaaatataaatcagattatattacacttctgctcaaaactcttcagtgtctcccattaccttttgaataaaagcccagttccttacccagccctgctaaactctagtcatctgatctcttctgctaactctccagcctccccttacaccatgcctctgccccgccccaaaccagactcgcatttgccatatgctcctctctgccccagggcctttgcaaccactgttccccctgcctcgggtctctacctcagatcttcctggcacatgctccttcttatcagcctccagcccaaatcctcagagatgccttccctgactgcgctctctaaaggaggacctcagtcactcacaccatcactgttttatcacagctcttattactattttatattttcttgttaatttatttgattaattctcatcaatctctctcaccagaaagtagtgcctaggagataaaaatagtcaataaaaatatgtgactttattaacacatttaaatatgagctcaaatctaaccaaagagaatatagcacactggagattctcaaattttggtgactgtcagcaccatgtgaagtttgagaaagacagcctgttccctgaatctcatgatccaatagatcagaggtcatctccagatatctgaaaattttaaaatccacaggtgattttccgagtttggtatacacggtgtatgatgtacaccaaactcagaaaaccaccaaaaccaacaagttctgattattatccttaaagaataacaaaaatcaacacctcaggagcttacatgtctgccctatcaccccttcctgtcatcctttcaggtcggggtgtcacctaccttaaattaatgttggatcatccaaaaaccaaggcaaatctagaaacttggaagaaccagataacgaaatgcagaatacaagataaacccttcaatcagagaactcaacctttcatatctaagagcatttatttaggagccaaatcaacaaaaataataacaaaagacatgatatggtgtttattatgtggctgatactttactaagcacctaggtatattaacttatttaatcctcgccaaaaccccgtaaggcaggcacttttacctcttgtcctatagataaggaatctgtggatcacagacgtgaatcatcttgactgtcttgaccgatactactcagcagggatgaggcagagctgagatgattggaaaatgaccactaacgctacaggcttaaagaagcacttacacattgaatccacttttctttaatcatcagagatgtggataaaaaccaacacacaaggayacccaaggcggtagtgccagcaagggaaaaaaaggctttggaggaggagccaggcagcgctgggtgtgcatccttaggcaagtctcttgacctctgggcacctcattggcttatctgcaaggtgggagctccacctacttacatggcagcaagcagctgtgatgattcagtgaagtataacaatgtccaaaaataattagcacgtgaacttcacgtcccctttccccttcgcttgctggactctagacatttctgaagttgcctgcagttttcctgcccctcgtctctgaggttcctgaaaacagcagttattaatgaggggaaggagaggagaaggtgaaagtttagcctaatgtttctacaagtacaaagtgaattccacgggaggcatacaagatggtttgtgatgagtacacatatcaacacgtgcccacttttttttcacagaataactttccaagtaaacaacaatttgaatattttaaagtgtattaacataatatgtatgtctgaatgtatattatattgtttataaaactcatgatttttaaaatagtattgctaaacatgagacttgagtggtacctgcaaagaaagaagtgagttgactaggataaaattaaataaagccggcgatgtggctcacacctgtaatcccagcaccttggaaggctgaggtgggtggattacctgaggccaggagttcgagaccagcctagccaacatggtgaaaccccgtctctactaaaaaacacaaaaacttgctgggtatggtggagcacgcctgtaatctcagcaccttgggaggctgaggtgggtggattacttgaggccaggagttcgagaccagcctagccaacatggtgaaaccctgtctctactaaaaaatacaaaaattagctgggcacggtggagcatgcytgtaatctcagctactcaggagactgaggcacaagaatcacttgaacccaggaggcagaggttgcagtgagtcaagatcgcaccactgcactccagcctgggcaatagagcaagactgtctccaaaggaaaaaaaaaattaaattaatgggatacaggcattttaaaattcagaataggaatgtttgaaaaattgaagtttgagaaaacctatgctcaaaataaaaccattagaggagagggggagtaaggcccagaaataaggcaggagaggagaggaagtcaagaataccactgagactgggccaagaaagaagctgccatccatgtgatgggtccacagagaaggatagatcgagtcaggattctcaagcagtttggctgtgcaattggcaygtattctctgaccccttggcattctctggagagaatgcactaaatattttcactgcatttcacctgagtttctcagcctcaacatcactgacatttggaagcagctcattctctgttgtaggaggctgtcctgtgctgttagcatgtttagtagcatctccggcctctacccatgagatgccag

SEQ ID NO: 8694 - DNA, 12664 bp, Homo sapiens
agaatattaggattgtggggtttttcttctctattctccaaactttctgtaaagttgttaacatagtcttcaccaacaaactcgtgactaaacataagcatttatgcaaagtctcaggaagtttcacacaccccaggatgaagaaacgtggtttcaggagtgaagcaacagatgaaaaggcaggcgggggaggactaagtgactgaggggtgggatcatcagttcctcccaggcagaagagaagattcttatctagagaaactggatactctcagaaatctaaggacacaaatatctggggtcttcaataaaagcaccagacaactcccaataggaaagctctgtggtcaaacatgtcctattcatacaaacacagcttgtgatcagatgcttagggctccacattaggtacagacaaccagaggctaccagacatccagagaaagtctctatatgaaagagcggtaacaagaaagaaccccagaaaaaaagagaagcaatgcagggaacaaaaatctactttataaaagagctaaaaaaaaaaaaaaaaaaaaaaagcctttactattctcagggagtcagcagaagaaacaacattcataataccagggctagatgctgtaaagacagtaacaacaaacagatgaaaatgatcaaagagtgagctggggagagaagaggagacacacacacagctttctttcttttgagacagagttttgctctgtcacccaggctggagtgcagtggcgcgatctcggctcactgcaacctctgcctcccgggttcaagagattttcctgcctcagcctcctgagtagctgggattacaggtgcgcgccaccacgcccagctaatttttttggatttttagtagaggcagggtttcaccatgttgaccaggctggtctcaaactcctgacctcaagkgacacttctgccttagcctccccaagtgctgagattacaggcatgagtcaccgtgcccggcccacacacacatttttaacagaaagaatggaagatgaagttaaaaatatctcccagaaagtaaaaacatagagatagaagatagattttgaggctcttttcaagcactccagtctctgcttaaggattccagaatgaagatttttaagttaaaaaagagacaattttccagaactgaaagacaaaaacctctatattaaaagggtccaatgagcaccaagaacaatgaatgaagactaacccttggcacctcaatggctaatttctaaaaaccaaggataaacttccagaaagaaaaaaaatattacatacttaagctacttacatggttatactccagtctttgacattcccaatatctgaaaacctttcatgatccaagtttgagcttcccattctttaactaacttcttctaccttcctgctcactcaatctagtactctaataactgttggaacttaccaggatctgtaattcactgaccccacaccttcatagggtcagtcttcctcctcaagttcttagttcctaattatatcactaatttcattgtgatcactccctggggtgttgtataacaatgctcctttgtcctttcactatactaatgtgacaaaaccccaatctctgcaaatgccatgcctgcagctgggcaactgaatgtggctggagagtagcacaacgccatgctgactcttcccactttaaatccttggtcaccaacctcagggaagccttaaggctgcctggcaattctattacatttctctagtccattcactctcctgcttatctggcaattattttaacctcctcacatctctaatacatctcctcatcgtagcagatcagtttgctttccattttactgaaaaaacagtttgcactcagaaaatttctacaagctcctactaccataaggatcccctcacctgcactgatgccggcaccctctgctttcctcctatttctttactttattttctttctttattttttgagacagagttttgctcttgttgcccaggctggactgcagtggtgcgatctcggctcaccacaacctctgcctcctgggttcaagcaattcgcctgcctcagcttcctgagtagctgggattacaggggcacgccaccatgcccagataattttttgtatttttagtagagatgaggtttcaccatgttggccaggctggtctcgaactcctgatatcaggtgatccactcgcttcggcctcccgaagtgcagggattacaggcgtgatccaccacgcctggcttgctttcctcctatttctatggaagaactgtccatgttatccaaagaccaatgcctccaccatcccctcacctattccaaaatctcttcgacagcaccaatttcctcctttctatgagattatccccattagtagagaaatatgttgatattttgtccatcttctaaaaaataccttggcctaatgtctccctgtagctaccatcccacttatctgtgcctagaaagagctaccttgctgtctctaatttatactcaccgattctctcttgagctaatacattatattatatgtgtgagtactgcaaaatatttgaaagataagctagaacattttggccaattagcagtaacacataaaacctaagagtttatagaaaaagaaacaactattaattttagacaaagctttacaattatataagaaaataaatgatcatagccaaagctcaacaatacttacacagtcgtaatttaagtaaataagccaaatatatcactgcaatagaaaagctagggaaagaaatgtagatatggaagtgggaagtggaagtcaatgatgtttaaaatgataaatttggagaaagctattggagtaacagaagaaagagcttaaaaaagttggggcctttgagtaataatgctgaggaaaaagagggataagaaaagaaacttctgattgtcattagaactttttagtatatttgacttgttaagctatgtgcatgcattactttaggaaaataatttttaaacaataaataactccaataaagtacaaatgactgaaacaagtgagttctgtagttcgtgtgaggggaaaggtctctgggaggctatgaaaattagtggggggaaaataatgaacttgaaagaaaactgtggtgtaaaacaggcaatatttcacaccaaaataaccataagctatgaaaagttggtcaaaagcaagacagcagatgcaactaacatccccagattcatagtaaatatgggatagatgcttccaggacaatatggataatgggtagcattttcatttaagagctaaatcagatgaatttcacaactggtacatgtattttaaaaatatataaaatgagcattttgatatccatttctgattggttcatggtcatcctgtgggaagtctcatctaaactgaacttacaccataactaggctatttaaaggcttgatttaaaatggtcttcagagtgtacatattaatgtatcttgtttataattcttattccaacatgtttgttaaattaaaacaactttcttccaacgaacatatagtttttcatgagtatctttttttttttttttttttttttttgagacaaggtcttactctgttgccaggctggagtgtactggcatgatcttggctcactgcaacctccgcctcccgggttcaagtgattctcctgcctcagcctcccgagtagctgggactacaggcgcacaccaccatccccggctattttttgtatttttagtagagatgggattttgccgtgttggccaggctggtcccaaactcctgacctcaggtctcgatctcttgaccttgtgatctgcccaccttggcctcctaaagtgctggaattacaggcatgagccaccatgcccggccttcgtgagtatcttttatgttcacgacatccttgtgacttaaatgcatgatatagattgtccctactcccttctttcagaaaattcttttcacgatataattctacatctctgttcttaccccaaggatagcagttaaaactctcaacataatacacaataagcctttaacttatactgactcagaacaaattaagtccccaaatcatcaatgccactcttcccacaaccctctgggttttcttcagaggttttagttcttcaataggcaagatacatcacgttcccatcacagggcaagagaacgctgacaaaaataaagatcttagctgagaaaagtactaagtagctgggtgtggtggctcatgcctgtaatcccagcacctggggaggccaaggcgggcggatcatctgaggtcgggagttcaagaccagcctgaccaacatggagaaactctgtctttactaaaaatacaaaattagctgggcatggtggcacatgcctgtaatcccagctactagggaggctgaggcaggggaatcgcttgaacctgggaggtggaggttgcggtgagctgagattgagccattgcactccagcctgggcaacaagagcaaaagtccatctttaaaaaaaaaaaaaaagaaagaaaagaaaagtactaagtaataaaaatacaccaattcacagaccagaccagaggctttaggtttctttctactaggaatattatactgttatataaaatcagttttctagttaacaattcacttaattctttaccacacgatccagtaatgtcactcctagagaaattaaaacttatgttcacagaaaaacctgtacaggagttctattcataattgccaaacactggaaactattcaaatgtccttcagtgggggagctaataccaactgtagcacagccatacaacagaatacttctcagcaacaaaaaggaacaaactgtcaatatatgcaacagcctgaatcaatctcaaagacatgatgctgagtgagaagaagccagtttcaaaaggttacataccatatgatcccattttatttgacattctcaaaaaaagacaactgaccaggcgtggtggctcacgcctgtaatctcagcactttgggaggccgaggcaggcggactgcttaagctcaggagttcaagaccagcctgggcaatatggtgaaactccatctctaccaaaaataaaataaaataaaataaataaataaaataaaataaaataaaataagccaggtgcggtactgtgtgcttgtggtcccagctactggggaggctgaagtgggaggttgcttgagtccaaaaggtggagcttgcagtgagccgagatcgcgctgcactccagcctgggcgacagagccagactctgtctcaaaaaaaaaaaaaaagcatgctattaaaaaacaatataaacttaattttcgacattccaaatgagagatcaaaagtttcccaaatgcaagaagttatatgattattgccttcttgaggaaaaaaaagttccatttacattagcaacaaaaattataaaatagcttgaaatgaatttaacaagcattatataaaacatagatgaaaaaagttacaaaacctgaaaacaaatttgagacacatgcacattcctgaatagaaacatttggcattagccggatgtggtggcttacactggtaatcccagcactttgggaggccgaggcgggtggatcacctgaggttgggagtttgagaccagtctgaccaacatggagaaacccgtctctactaaaaatacaaaaattagccgggcatggtggtgcatgcctgtaatcccagctactcgggaggctgaggtgggagaattgcttgaacccaggaggcggaggttgtggtgagctgagatcacgccactgcactctagcctgggcaacaagagcgaaattccgtctcaaaaaaaaaaaagaaagaaaaaaaagaaagaaagacttggcgtcattaaaatatcaatttcctcccaaactattaataatttataaaaccaactaaaccctcttttctggttagcgtggcatgagaacccataagcagcaaagtctctcacgacaccctggatgaggcggtgcaggaagtcctgcacgggaaccagtgaaagtgycccaagttcctgaagatggtggagttgcagatcagcttgaagaactatgacccccagaaggacaagcgcttctcrggcaccgtcaggcttaagtccactccctgtcccaagtgtgggtcctgggggaacagcagcactgtgrcgagaccaaggccacggatatccccccaagtggacactgaggtgccaaaaaaactcaagaataagaatctggtcaagaagctggccaagaagtatgatgcatttttgscttcagagtctctgataaagcaaatcccacgaatcctcggcataggcctaacaaaggcagtaaagttcccttccctgctcacacacgatgaaaacacggtggccaaagtggatgaggcgaagtccacaatcaagtttcatatgaacatgttatgtttggctgtggctgttggccacgtgaagatgacagacgatgagcttgtgcataacattcacctggctgttaacttcttggtgtcactgctcgagaaamaactggcagaatgtccgggccttatatatcaagagcaccaygggcaagccccagcgcctatattaaggcatatttgaaaagattctactgctactagtaaaaaaaacaaaaaacaaaaaaccaactaatcccatgaaaactaatctaatcaaaatttcatgctctgtttttagaaaatggcaacttaattctaaaattcatgtggaagagtaaatgaccaaaaaaaaaaaaaagctatgaaaattttgaaaaataagagtcattggccgggcgtggtggctcacacctgtaatcccagcactttaggaggctgaggtgggcagttcatgggttcaagagatcgagaccatcctggccaacatgatgaaatcccmtctctactaaaaatacaaaaattagctgggcgtggtggcacacacctgtaatcccacttactcaggaggctgaggcaggcgaattgcttaaacccgggaggtggaggttgcagttagccgagatcccgccactgcactccagcctagcgacagagcgagactccatctcaccaaaaaaagagagagagaaaaaaaaaagaatcatcaggaggggaacttgacctaaaacatacaatccacagctgcagtaataaaaacaccacggtatgggtataggaccaaataaacagactggagaaataacaggacacatatgagaatttattatgtgttaacgcaggtatcttcaattgttgggagagaactgatggttctgggacaattgtaatccaagtggaaaaaaaaagtcagatccctacacctaatactaatcttcccaaatacataccacatgaattaaacgttaaaatgtgagccataggaggagtattagaagaaaatacaaaactggttttttgtttgtttgtttgttttttcgagacggagtctcactctgtcacccaggctgcagtgcagtgatgcagtctcagctcactgcaagctccgtctcccgggttcatgccattctcccgccttagcctcctgaacagctggggctacaggcgcccgccaccatgcccagctaattttttgtatttttagtagagacagggtttcaccgtgttatccaggatggtctcgatctcctgaccttgtgatccacccacctcggcctcccaaagtgctgggattacaggcgtgagccactgcacccggcctatagaactgttttttaagtcacgggacaaatcttcaagaagacatgaaacccaaatgtaataaagaaaaagattaaatgattttgccacataaatacttaaaaacttccctaaaacaagaaagacatcataaacagttaaaaggagtaatctagggaaagatattcataacctacattaacagacacatcagacagatgactgaaacataaagggtttaaatcactaagattaaaaaaaaagaaaaatgaataaaggatataaacaggaaacttgttttatttttatttattttagagagtgtcctctgttgccccggctggagtacagcggtacaatcatagcacaatgcagtcttgtactcctgggctcaagtgatcctccttgccttggcctcccaaagcactatgaatacaggcatgagctactgcgggtggccagggaacttgcctcaaaaagaaattatgaatgacaaaaatatataaaaagatcataaatctaagtagtgaaaagggaaaaagcaacttctggttttttctacaccctttttttgtccatacgtgctatggtttgaatgaatgtcccctcccaaactcatggtgaaacgtaattgctgttgcagcagtactaaggcatggggccctggagaggcaatcagattgcaagggctctgccctcttttcttcctttctcctcctcttcccttccttccccactctttgcccttccatcacgcccttcatgtatcaagaaggccctggccagatgcagcccctggatcttggacttcccagcctccacaattgtaagaaataaatttcttatctttataaattacctagtccctggtattgtgttacagcagcaaaaacagactgagaccttcagatagacaaaaattatctacagtgtagaagcatgtacgaaaatgaacactctattccattttggtagaataataaagtaggtacatcactttttattcaaaaccaatttagtagtatctattacaatgtcaaatagtcatccactttcacccaggacttccatttctaggaattatcctacagaaacacttaacaaggacacgcaatgctaaagaatgtccactgcagatctgtttgtaacaacaaaaatttagaaacaaccctaatgcccactgataggaaataaactatggtaccaccatagccaggaagactatgctgcctttagactaatatgtcagatctatgagtactaagacccagacatggtcaaggtacattactaagtaaaaaaactgtcatcatgttccatgagtccctttctgttaaaattttttaaaagttaatgtctatataaaaaactctgggaatatacaccaaactgctgaaagtgattgtctttgaagagacaaatttcaaggaacttactttctacataatgaatttctatatttctataatgtttacattttatatgtcatatctacaataggcaaaaaaaaccccacaagagtaaaatgattttgttcaaagtttttccttttttttttttttttttttttttactttaagttctgggatacatgtgcagaacgtgcaggttaaacaggtatacatgtgccatggtggtttgctgcgcccatcgacccatcagctacattaggtgtttctcctaatgctatccctccccttgcccctcaccccgacaggccctggtgtgtgatgttcccctccctgtgtccatgtgttctcattgttcaactcccacttacgagtgagaacttgttcaaagttttaaaaaaactgagaaactgagaaagtttttaaattaaaccactctgctagtcatattcaagcatttctagagaaagaacctactagaagtaaacaccacaggccagactctagataatgtaaatcaggtaaggtaaatggaagaggttcgtctgtctcaacgctctcttggcccaccatctctgcccacatgaggaagctggcaagtagccacctggaactggtgggaactaagaaactcagaggtctcaccgttccttatctcaagaaagctttaatcaaggacaacaaggacagctccgcccacacaagctgtttacagattccaaaagcagtctataaggcagctcagcaacaaggagtcttaactaaaaatccacaagaattttatcactaaaattaatgaattgtcaaaaggcaaatttctggcaacagtcttttaaaattccagttagcacagtccagtgcttcccaaccttttccaagtctccgcacacacaggaaatgaaaatatttacagggcacactgctgcaaacagaggatgcatgctgacagatgacagacccagggctcatgctcttgcagccccaggcctggtgggctgcaggcatgaatgctacgccatatgtgtcacagtcttggcacatctatcagaagggtctcgcacagggagagcatttgttttaaaagcttccttcaaaagtattactacattcaggccaggcatggtggctcacgcctgtaatcccagcactctgggaggctgaggtgggtggatcacctgacatcaggagttcgagaccagcctggccaacatggtgaaaccccctctctactaaaaatacaaaaaattcgctgggtgcggtggcgtgtgcctgtaatcccagctactcgggaggctaaggcaggagaatcgcttgaacccaggaggcgggaggttgcagtgagctgagatcacgccactgcactccagcctgggcaacagtgagactctgttgccaacaccacctcccccccgccaaaaaacagtattattgcattcatttagcaaatatttattaagtacctaacaggttccaagcactgtgttaagttctgtcatcttcccctacagactggagatagcctacaaactagagaaggagacagacaaacgagcaattccaatacaatgtaaattgtgccatataaggggagtatcgggatttttatggaatcccatgcctggggaaaggggatttgtcaatgattacttctcagaaatgttccctaaacagaagagtaaagagtatttcaggtacagggaaaagcaggcgcaaagacctaaatgcaagaaactacatcaaaggttgggcacgctggcttacacctgcaatcccagcattttgggaggttgaggcgggcagatcaccaggtcaagagattgagaccatcctggccaacatggtgaaaccccatctctactaaaaatacaaaaattagccgggcatggtggcgcacgcctatagtcccagctactcaggaggctgaggcaggagaattgcttgaacccaggaggcggaggttacagggagctgagatcacaccactgcactccagcctggcgacagagctagactccgtctcaaaaaaaaaaaaaaaaaaaaaaaaaagaggcaaaacaggctctgtaccatatgagtataacaagaggagggagttagttttgtggttttaatgcatgtatttttgattaataggaacggggctgagcagaaagccatttcacaaaggttaggaaagtatgtgccttcctacacaataaccgattaaacatacgctatgagaaaagtagagagattaagaaacttcttgaagataaatctgtaaatattgacaataatattgattagcaagtaacatgagctcatacacataagtgtatacctgaagttaaagacaatttttactgtggtagcagacatttgctactgaaaaagaacaaaacattacctatttttaaaggtaaagactatttaaacactctatgatatttccaacgtttaaagtaatgggaaagcaaaagaactcccagatgggccaggcgtggtggctcacgcctgtaatcccagcactgtgggaggctgaggcaggcggatcacgagatgagatcgagaccatcctggctaacacagtgaaaccccgtctctactaaaaatacaaaaaattagccgggtgtggtggtggatgcctgtagtcccagctactcgggaggctgaggcaggagaatggcgtgaacccagaaggcggagcttgcagtgagccgagattgcaccactgcactccagcctgggtgacagagtgagactctgcctcataaaaaaaacaaaaacaaaaacaaaacaaaaaactcccaaacacctaatatatgtttcatgttcttttgagaaagcttaattaggctgggcgtggtggctcatgcctataatcccagctactcaggaggctgaggcaggagaatggcttgaacccagaaggcggagcttgcagtgagccgagattgcaccactgcactccagcctgggtgacagagtgagactctgcctcagaaaataaacaaaaacaaaaacaaaacaaaaaactcccagacacctaatatatgtttcatgttcttttgagaaagcttaattaggctgggcgtggtggctcatgcctataatcccagcactttgggaggctgaggcgggcagatcacctgaggtcaggagtttgaaaccagcctgactaacatggtgaaaccccacctctactaaaaatacaaaaaaaaaaaaaaataattagccaggcgtggtggtgtgcgcctgtaatctcagctactcaggaggctgaggcaagagaaacgcttgaacctgggaggcggaggttgcagagagccgagaccatgccacttcactccaggcctgggctacagggcaagactccgtcccaacccccgacacccccctaacccccaaaaaaagaaaaagcttaattagtgaggcatggtggctcatgcctgtaatcccaacactctgggaggttgaggcaggaggactgcttgaacacaggagttcaagaccagcctgggcaacac

SEQ ID NO: 8695 - DNA, 27852 bp, Homo sapiens
  misc_feature (1)...(27852): n = A,T,C or G, or insertion/deletion polymorphism (see Tables 1-2)
nnnnnnnnnnnnnnnnnnnnnnnnnnnnnnnnnnnnnnnnnnnnnnnnnnnnnnnnnnnnnnnnnnnnnnnnnnnnnnnnnnnnnnnnnnnnnnnnnnnnnnnnnnnnnnnnnnnnnnnnnnnnnnnnnnnnnnnnnnnnnnnnnnnnnnnnnnnnnnnnnnnnnnnnnnnnnnnnnnnnnnnnnnnnnnnnnnnnnnnnnnnnnnnnnnnnnnnnnnnnnnnnnnnnnnnnnnnnnnnnnnnnnnnnnnnnnnnnnnnnnnnnnnnnnnnnnnnnnnnnnnnnnnnnnnnnnnnnnnnnnnnnnnnnnnnnnnnnnnnnnnnnnnnnnnnnnnnnnnnnnnnnnnnnnnnnnnnnnnnnnnnnnnnnnnnnnnnnnnnnnnnnnnnnnnnnnnnnnnnnnnnnnnnnnnnnnnnnnnnnnnnnnnnnnnnnnnnnnnnnnnnnnnnnnnnnnnnnnnnnnnnnnnnnnnnnnnnnnnnnnnnnnnnnnnnnnnnnnnnnnnnnnnnnnnnnnnnnnnnnnnnnnnnnnnnnnnnnnnnnnnnnnnnnnnnnnnnnnnnnnnnnnnnnnnnnnnnnnnnnnnnnnnnnnnnnnnnnnnnnnnnnnnnnnnnnnnnnnnnnnnnnnnnnnnnnnnnnnnnnnnnnnnnnnnnnnnnnnnnnnnnnnnnnnnnnnnnnnnnnnnnnnnnnnnnnnnnnnnnnnnnnnnnnnnnnnnnnnnnnnnnnnnnnnnnnnnnnnnnnnnnnnnnnnnnnnnnnnnnnnnnnnnnnnnnnnnnnnnnnnnnnnnnnnnnnnnnnnnnnnnnnnnnnnnnnnnnnnnnnnnnnnnnnnnnnnnnnnnnnnnnnnnnnnnnnnnnnnnnnnnnnnnnnnnnnnnnnnnnnnnnnnnnnnnnnnnnnnnnnnnnnnnnnnnnnnnnnnnnnnnnnnnnnnnnnnnnnnnnnnnnnccgctcaccctgcaggcttttctcacctttcttgctcctcctgtgcatgaagatgcccactccacagatgatgagccccagcacgaagcccccagctcccgtcaatgtcttactccgggcagaatcagactgtgcctctgggaaggacagacccaggtttagtgtcacctccaccagctgcatccctactcatgtcctgtctgagattctggagcctgatgcagmatatcgggatgaggacagtgcagcggaaaaagcttgctaagaggaaattcagaaagagccaccctcatatctggaacaggggtgtgacctcaacaaggtggcaaatgctgattctggaagttgcctctcaaaatgcctgagaagaggctaaaatgctgaaggaagagaactgttcctatgtgtgaggtcagttcctaagtgtgagggtttcgagaccagtcagtgtccctagattctctgacaagggggagaactatgaatcttcaggaaccccyaagccaaggtcaggaagtctccattkccctggcttcaaactatgctcaggagctggtatagaagaaagatggggtttggacatggccccagggtatagatgcagaagataagatgagtggaccccagagccagagagtcccctgctcttcagaggtggggtctagabggtcatcagagactcactccactccacggtgacaggactytccamgctggtgtgctccacttggcagytgtagacytctccctgctggggggtcatttccagcatcwccaggatctggaaggtccagtctccattacggatcaggttggtggacacgaccccagctgtttcctcctgtccattcaggaascatcggacttgaatgctgyctgggtagaaatcngtcacgtggyagacaagcaggttgtggtgctgcaygggcyccttcttggagggggaaacrttcaccytaggctggactaggagcgtggaagaaaaataatgaaatagaatttgagattgtccttctttccttccttccttccttccttccttccttccttccttccttccttccttttttttgagacataatctcgctctttctttctttcattctttctttttgttgagatggagtgtcactctgttgccaagtctggaatgcagtggcgcaatattggctcactgcaacctccacctccgggcttcaaccaattctccttcctcagcctcccgaatagctgggattataggtgcctgccacttcacctggctaatttttgtattattagtagagacaaggtttctccatgttggtcagsctggttctctaggagcacttgaccaacgcctgacctcaagtgatccacccgctcggcctctcaaagggctgggattacgggcctgagccactgcatctgcccagattattatttcttaggcatgttcactatgtaattgattcctagatgttgaaaataggaataatgtgattaggctagtgggtaagggtagcattgaaaagatagaaatagaccttcaagtagagcatgcatgatcttgaataaaataatagttagtaagtatatagcggaatggcagggagacagagtttgcactctgtagcacatttaggagaaattttaaccaaaagtaatttgggcaaagaatatttgatcaactgtgaaattacctaccttttcaaagttctatcttgatacaaaggaagcaaaatttactcaaataatatcttgaaattaagatatacagacaatggcattatggtggcctgtgaatctaataacttcatgaaaatacaaagaaaatgaagagagctttacatgtcttattctgtaaaaaacctatgtatttttttacctcacctacaaaaactcaaaatcttcatatttacagaatatcctgagctcctacatgcttgagtagtagaaatcccgtcctttttcaagttcctcctctgtgctgcgtcttcaggtcccatgaaggtctcacagatgaccaggtgttgcctccctctgcatctttgcatttgtgccccagcttgtcctgttgttctcaggtgaatttccacactgccactggcaacttttcttttggatctctgccaccagtacctttttcctcctcagaaagcagaaaaggccaggcatggtggtcatgcctataatcttagcactttgggaggttgaggcatgaggatcacttgagcccagggttttgagaccggcctgggcaacatagtgagaacccatctctaaaaagaaaaataaattagccagacatggtggtacgtgtatctgtagttctagctacatgggaggctgaggcaggaggatcacttgagcccaggaggttgaggctgcagtgagccatgatggtgccacagcactccagcctgggagacaaagtgagaacctgtctcaaaaacaaacacaaacacaaaacaaaaaacaaacacagaaaagggtcaagtgctcctagagaacagttcattcagggagatccactagagaacagctctttcagaggactaccctagagaacagctcatcaagaggaatgtctcaaattagtcttctaggtccctaatcactcagttctttcctttctacttcctggagaacacaaataccctaacatggcgctgggccaggtaaaagtacagtcttgaactgacacacaacccttactccctattgtatttttgccttgttttcagactgatccacattgtcagcctcttccctcaatgtgagtttatttcaggggcacctgtgtctcactacttcattacctcggttaactcaatgtccattacactattcaacttatgtctaaatctcagttgtgaattacctacaatttcttccccatagagcttctgggaaccatgaaatcagggggaatacttgggtatctgttttaaggtcccagaacattccaygagaggcatcttgctcaatattctttgacaggagcaggtcagcctggagccacatcagygacctccagggkgcgctggagttaaggcytgatacccaatggcctcatttctgacccagttcaaatacatttcaccaaggcaaggattcctgtttgttctagttgccttctctaatgcccagaaaacatttgctcaattacttctagatttgggtggacatccaccctggaattgtcactacttctttcctcccccttccacctctcccttgcctctgtgttttccctgttctaactcatgccttgattgcaatttccctgacaaataatagcagtttcctacctcatctccctgcctctggtccctcctctagccagcacccttagtagtcttctgaagacacatctccaaccttctctttttcatttttcaaaaatcttcagtgttctgacaatacttatctggctacatgggaacctctagggagctgattacaagcagagatccccmgacctcccyacccagggaatctgagtctgggggcactgagtctggagatctgtgcatcacagaggatctccagaagagtcttcagaggagtgaggttggggacctgcgggcctggaggagaaacccacactccttaggctggcatcagggctgtctgcaatctggcagttgattactgtgaaagaaaatgctgccatgtcactgattggtgcctctacaaagtcttagtaacagtttttgccaattgcgttatttttatttgaacacctctctcaaccaattacctcagcaactttcctaagctcatgtcactcacctcatccccacccagtgtgtccaccttctcactcatagcaggtgaacttcctttcactttccaggaacaagaaaatcaaaggtgtgatctccccagcttcctcctcctcctcccttcatttttttcctctttctagaaaaaaggtccagggctcaatcccacatcctgatactactccctcargtcccwmaggttggtgcaccaggctccccaccccacaagttcacaggaggaagccaaagctccaaggccttcctgtcccatccttgagaaatcctcttactgcacacacctcacctctctccatccctttacacccagacttcctgaaggaaaaagaygaatgaactsagacactgccctgtgmcagccgtggggaacccaagacaagtaaaatccatctcagccccgaggaggatgcgccacactcagcctcatgcaccccctcccattccagctcctgccgctgcggccaacctgctctccccaggtctccctggtttccaaacccactttccatcttctgttttctgaccttcccaagtcactggcaccgctgtccactgtgctgctgaggtcacctcccctcagcttccaagactcttctctgcgggcctctcctcacactgcacttgggttttwttggtctctttcacaggcttttctgtcttggccaaatcacaactgtccagttcccaggatccrgtcctttgctcttccccctgggtccyctctccctggatggtctcatgtatcycagtctcctccccggctgcagacccttctgtctacctgcccatcagaccacccatctgcccctcaagcacctcaaacccagctacctccctgtaggtttcttctctgtgtggcctgctgtgccatctccacctccatctccacaccatacccttgtgcgctgtcctgtggcttccttttttcaccccacatgcagtcagctgccaggcctgatgaagtcccsggggtctctctgctcycgtcctcctcactccatgctcagcccagtccaggtccccgcgctcgctcccctgacaagctccagatgggctccccccatgaatccccaacccaaagtcccctttccgcccggcactaaggtcccttaggccaacccggctgctcctgcgccctgggcacgggcccrcggggctgccctgggaccsccggcccaaagccctcactcacctcggcgctgcagggtcaysgscycghccagctcgtagttgtgtctgcayaycctgtccggcactgcccgcyyctcctccaggakgtccttctggctgttccagtastcckcakcaggccgccccagctccgtcaccgcccggaactcycccacgtcgctgtcgaagcgcrcgwrctcctsccggttgtagatgtatctctccaggaagcgctgtgtcccattaaacgcgtagcattcctgccgtnnctggwamasgtaattctctgcggggagggggcggacatgagcggaggcgccactctcatctaatcctctttctccctctctctctyaatattaasgattcttcccaaatctwcccacycagggctrgattttaaaataggagttttcctagtaycgagttctgtggtcctaagcgggtcgcagagcctctccaggcctgttttctcaccaygcagagagagaatttactgaaaagaatgagctcaggggcactgagtgatcactagggaggggcgagcactgaggggaaggcagtcccttctgctggtggctggaggaggcggagacgtttcacktggggtcactgggagaaaaaacaggggcgggaggagctggggacgtggagggcggagctgctccccctacttaactccctgactgacatttccatcctgatgtcagtcctggttcaaatgccacctcctccaggaagccctcccttccttctytctcttttccatagctaagcgctctctcttctcgaccagtttcttgagaattcctcaacttgctcctgttgttttgcatktaggaratgtagaaatatatttcttaaaactttcttcaactttggtataagaaagactctgtagcctgaaagttaattttcaaacatggctgcagaaagacttggtgtcaaaagatgtggraagtattttacacaatgaaaatcaccacaacaaccagggacctgtgggggtagagtcctttgggtttagaggcattsatgtaattttttttggcagtttttatggttttatttacacacaaaacgtggacatgaactttctactcattttcttagctgtgcaccstggtactggggttggtgactctgatggccggctgggtgactctttccatgatgactttgcagttctggaggaaattttgtgagcgatctcagcacagtaagatttgttgcacatcagcagcactttcagctccttgaggctgtggrccagaaacttctggaagccactgggcagcatgtkttttttgttgttgttgttgctcccataagcaatgttgggcatcaagatctggcccttggaccttctacgaaccctactgttaagacctctgggtttccgccagttatgcttaattttgacatttcagtctgattggtgcctcatgaacttgttggtcctctttttgaggatcttatccttcatgaggagtctgagggaggccatgatgtggaggaagagatggctgccagctgcatagrcagcaccgaggaagacagcattgatgtaatttttacatgaacaattttggcagcctttcccacatgctgttcttcctagggagtgccatgagcagtgtctggcaggtgtgtgtctacacagaattatcagtgacacggcacatgtttgtttctgtttgagtrtcttcaggcctgctctgttcttgggcacactggggaaattaaggtgctgtgattgttctgctcatctgtttcatgctccacaaattaacttctccagtttattaacctcacccctwgcagaagttgcacagctggtggcagaggatagtggagatggggtagggctgggctcaagggcaccatggagtccacctttagtctccagtgtcattgctaaggcaagatcccaggtcttgactcagatatcctgacctgcctcttctcctggtgcsttgggcsccagaccctraaattccaggcccagrgccccccagctccttgagtccagattcctcctcctctgccatccatccgcccctgcctgttcarttgccccactctgagtgtggattctcccattttcatttgttagtctttgtttctcctcctcaatcaccagtaagagaacgtttttcattcaagaataagaattttgaattttttctttgcaacatttaatttttttaatttacccagtcttaggtaattttttaagtacatttaacttttgaaatggaattttacctgccaagtagacataagcaatgaggggttttatggtgtaatttgaaaccttcatttttttttgtatataagaaactttatcctgtttgtggaacccttagcaattgagttgcccagagcacggtttgaaaccactgatctgaatgaattcgtctcttattcagaataggatatattaaaaacctctagctccctatgggttgtctcagccaagcttttctcccccagcctctttaagctatagcctggctcctcagccctttggtcttgtgccctgtttgaggttggggatgtgtgtggagttgggggagcatgcagggaattgtggaatcagccctgcccactttacccactcccctatggctccagctctccctccagcarrttttgattgaacattcattctacgcagggagctccagtaatctaccctcagtccctgtcacatggctccactgcctcatctcattccccctacaaacctcaacccagcctttgccygtcctccctttcactgyccagcatcacatgcycccttctgctctctgctcccccacctctgggtttccttggtgrctcccaacactgtccctcatcccacatgacagctctgcctatgggatggggrygcygcatccgtcacytcctcctgacactgttcagtgtcaccagtgctgctccagcctcctctctccccagcctcacccctctgcagttcccagggctgagccgtcctgctggttagttctcagcacccttctgtgactayaagttcaagttctcctccccttcctggacaatgaacccraggtaatagataagaggttttagggcttgaggggctgtattcaggagattccaaccttgctaccctgaaagatgaggaggtgacatgatgtcagtaccttytaggtgtgtcctaggaggggtgtggagaggtctaggaggaagggtgtaagcaggaaargtggaagtcagtggaaaactaaggtacctactttgcagtccttcctctcagagtgttggtgtaaatttggactagaaatgtcctgagagtacaatggttgaactagtttacagtcccaccaacagagtaaaagtgttcctatttctccacatcctctccagcacctgttgtttcctgactttttaatgatcgccattttaactggtgtgagatggtatctcaagacagtgtggcaattcctcaargatctagaactagaaataccatttgacccagccatcccattactggrtatatacccaaaggattataaatcatgctgctataaagacacatgcacacatatgtttatwgcggcactattcacaatagcaaagacttggaaccaacccaactgtccatcagtgatagactggattaagaaaatgcacacatatacaccatggaatactgtgcagycataaaaaaggatgagttcatgtcctttgtagggacatggaggaagctggaaaycatcattcacagcaaactattgcaaggacaaaaaaccaaagaccacatgttctcactcataggtgggaactgaacaatgagaacacatggacacaggaaggggaacatcatacaccggggcctgttgtggggtggggggaggggggagggatagcattaggaaatatacctaatgtaaatgacgagttaatgggtgcagcacaccaacatggcacatgtatacatatgtaacaaacctgcacgttgtgcacatgtaccctagaacttaaagtatatatatatataaaaagaaatatcctgagagtatcctgagagaaaaacaatggatcatagatgccataatattacaccagccacagggaggcagcaggaagaagagatttttcacttggttactgcttccttggctgtctgataacctacactcaatccctgtcatgcacccacacaacctcatctcattcttcctacaagtcgcaacccactctagtaccctaaccaagttctggggaggctgggagaagtacctttaatgagaatgccttcaggggctaaaacctatccccctccctcccttctctccttaattgtccaagggrtgtgggctcctgctccaccctggggaataagaggcattcttcgtgagcactgaatcctcagtgatcctcagagcctggacactccagcttagggctctctgcctgagtcccctccaggctggatgcagayrtgaacacgcccaggagcctgcacttgccaacttctctctstgcaaaccttgtctgtccaaggttatccwggacctcttggtcccattttccccaaagacaagcactgaccactgggcacctctctctgtttactgtacccatgtccttggagagagaataggccagtagggtagcaagctatcctataggggatgaacctctttctctagctgggaagagaggacactgccttagggcaggagcccccgcagcctgtctcagaatttgatcccttaaagataacgtcccctaggaattgttccctgagcyagaccctccaagaatggcagytcggctcttacctggagtggccctgccctggaccacagatgtgagcagcaccatcagtaacgccgtcagagccactgtccggggggccgcagaaacctgcagaaccatcatggagctggaaaaggatggcaaaatgraaagagctgcagtcaggaaaagaaggactcgctaaagggagctcctgtttgaaatattagagaccatgaacccaagtagtcttctgtgaccctgggattggacagagtctgagaaaagaaccaatggacactgagctttgtatgagtcattgctcactaggcagaaagttagtatgaaaggtctgaaaatataaagcctgtgatgcacttaagatgacggaggaaagacagtgatactcattttaaccagtcagataagtcatgatrtttggsgagattatgcgttttctttgctctgaaggtgatctcaaatattctgctggcccatctacagggattatcatttccccaattctgccacacctcacacacccacaggacatggtctgttgtggaaaaagtgctatcttagtgtgtaaaaggtcattcagtggcatgacttagagggattagagtacccatctcagaactcaaatgaggtctgagtctgtctgtcttgcctttgtccaagggtgtgtttaagattagcacccattcatatttactttctcccagaggtctgtgagtcctgcgatgtgcaggagttaccaggttcttccacaggactgtcatcagggtcaggagggctcagtctagggaccttacactgggagcgtggacacaccacctaccctaccatgtaaatatgcagctttaacgacactgcctctcttggacttcgattccttgtcttcaatatggggatgatataacctgccttatagcaaagctcttaagatcaaatgagatcaataggtctgaaattgctttggaaaaataaagtccatagagaatataaattgactggtaaataaggaagaaagtgaaaaaaaatcatcaaagaccccacctccttcaaagcatctgattctaytttgtttagagtgaatatttttacaaactttcaaagaacattacttcttactttagacacttataaatgtgatcctgttggaccaccaattctaatttcaaaaaaaatcaaattggcatcatttctttaaatcaatattaaaatgtaaatagaaggctagcatgtaaaatgcaagagaagaaaataattatgtagtagaaggtgtctagtaggattaaggggccaggagaggattgtggagaaaaactcagtttttttagtaactgcctgggtgggacttttctccttgtcatttacctgccatagataattagacaaatacttcctcgatgtctcaggtaatttatttttacagtagacattaataatacctccctcaggtttaatatgaggtttaaatgaggtaatgcatgcaaagcactaataacagaatctctcatgtcctaatctgttagtaattattatttatgcaaggtaaggctaccacaaataagataaaatattaacgtaatatatgtacttcatcattacattaaatagtaaatgttttgtgaccttctctatgagtatcaaataaatagctcaaaaytgaaatatttaaaatgagactagaaaagtatttcttaaatatggtaaagagaatataaaataaaaaattaacattacctgtaacagaaaaacattagagaaacccttcttaaaaacaagatcaaaatatgggcgcacattgttaccacaggtaatgctgtcctgggtattcttatatgaaaatgaaataacaagactagtaatttaaagataaaaatgttattacactgtttaaataccaggaaaaatcaaatactaagaaatctgaaaaataaaaattatctagaaatttcactaacaaaggtaaccaggaatagataaacaattaaagatcaacttcattcaagttaattaaaacctctaaatagaaattataacacttctgcagaaatgattaaataaaaaggaggtatctcagggaggtggacctgaaagaaagattaattatatattttattagatagcacattcattcttaattatcagcagaatatttttgtaaaatattgacaacataacataaaacatgatttaaaatatagtgaccaaaaaacatcraagatcatctgactgtctgggatgggggtggggctcgggagaaggaacataatggaaaacatttgccgtcagaagaaggtgtracttatctttttacatctctttctctaactctgaaaatgaactgtgaactggagctctcttraccacgctggtacctaaaattctcccatctcttccccagcaccttccagcgtcctctttacccagcaacagagaatgtcagctctatgatttctctgataggtgaatcccagccatgctgattcctctccacccatttscagtgctagaggcccacagtttcagtctcatctgcctccactcggcctcagttcctyatcrctgytcctgtgctcacagtcatcaattatagacccyacarcatgcgcccwgaagacagaatgttccatatcagagctgtgatcttgagagccctctccttggctttcctgctgagtctccgaggagctggggccatcaagggtgagtgstcaggaggacgcargagcgtyggggtgagtgatggggtggttcacatcaattgytgcttcaggratcasagattttaggggctcattgatctatctggtcctcatagtctatgttccctctggccctcataataataacagcaataayagccagaatttatgagackcctgcataktttctttccccatttacatctcacaggaaycttcaatgaagataatattccattcatttagaaattattccttttatttagaaattattttgaaaaaactgaagctcaaaaagatgaataagttttccaaggttacacagcagatcaacgagccaagtttgaagtccagacccagctctgagggtcrtacactgccttccccagattcctgcacacagtgacctactaycagggccctcctatctctctgggatccccagcctctatcttttgtggctgctttacaggaactccgagctatggactctgcattaggagasgaagtgcaaagagtgtttctgtatcctcyctctcttctaggaccctagggctcttcctgggtctttgtgggtggtcacaagctttcctcyctcaagacagcagggttgcatggtcttgatagccttgtgattcgggttctgagagatycaggactgcaagggaggcctagacttttgatagctgcaaggactcagccagagatggaccgtagtgaatgctcctttttcctgtagctgaaatcagggagaatgacatcaagcctgtgcatgatgctgtcattccaaaatctagtgatggggaaggttagaatccataacgtacaagatgcacactggcttcagacagttttatttaagatgtgtagaataaagaggaggtcaggctgggtagaaccagaagtatctattgccctgttcgcggtcacctgagttatttytaatgttatgttataataaacaccacaataggcttctcttcatagatgcaaatactttttagtattcttggtagaaattcctaatgagctcagctgtctcttcagggcttccctgcccagtctcttaacatttaaacatgtmatttaccttaaaaacataagtgcaaaycaactgataaaaaacaaccttgccttcagtctgcatcctrtcccagagacactttctttgtgtcctcacacgtggagctaagcttctgacttgtctctggtacatccctgaggatcctctcatcttggccatcaggaacctctacagaaggtcaaattcagtgggttcttctcagtgcctctgacttgagttactaataacatttgcactataatccacttctttctgatgaactaccctgtccttatttttctcctgtttacctggatcctccttatcatcttttaaaccacctcttaactatcatgttctctcattataccctgagatctcggcaattctgatttttggcactcttcctggaaaatcttatttaacctgcacctgccactaatgactctcagttctatggcctaaattcctctcctgagaccacccataatccacaaatatctatgtattatttctccttagatgactttcaggtcttctaagtgcaatagccccacagtaaactcagtatcttctcccggtcaggctgtcttccctgagagaagtggcttttgccctgttttctgaatgcctacattgaagccatctgttccccaggaagccttccctgatgtgctgtttggtcgcatcttgtgtatacctacgtatctgcacttatccttctgaacctgctgttgtcctgtcacttgtgtttccttctgtgacttatacgygtctgcagaacaggacgtatgtattatttttatttgggtatttagcatctaacagtgtttgacatatagtagtcttttaatacatatttttgtctgaatggaaatgatattttgaagaaaaataatctgttccatagctggctgatctttggactgcagaacttgtgaaagtgttttttaaaaagcattttaaaaagtacaagggacattcatgtattaagaagatgagtttccaataactgctagaggactttgtgtctttttattttaccctctttttcctgatgagtcctttgagtcctttaaactgaggagcaagctaagtttcctagtgaaatacctataggatttgttttgtttagtttcaaataccactctttgcttggccacttactgtgtcagggagtcattctcagtgaaaaataagacacaggtcataccctctagacacttacaattacagtggcaaggagtcattctcctgtcactgtaagtggccaagcacagactgggtccccacatgtcagggctgaaaactcacagggaaatctgtgagttgggaggtgagagcagaagagtcccgtagttccttctcactctgatgcatttatcattctaaacccagactttcacatacacattcatcrttttctttcatgataatagttgcttttatcctcttatctttgctaattcttacaaactaataaagactaagaaacaaaataaattaaatcctacaggtgttccaaactcagcaataatttctagttggcctctaaaacaaaaatcaaaatataaatgtaagaaaagttyagaatgcttagtacctgtgtgatgaaataatctgtacactaaacccccaagtcatgagtttacctatacaacaaacctgcacatgtactcctgaacataaaataaatgttgaaatatttttaaaaaggaaacaaaagtttggaacaaatgccaaaataactgtactgtacttttgaatttatatgccccaaatgaaaaatattatcaacaaagctatacattctacaktttcatgttcataaactaagacagaaactttaaaactgtcaagagccctaaaatttgaaggatattttcttcttcctctcaattttgtatttttttctaccttttctataataagaaaaagaaaatgtccattcccccacccccatgactctaaaaacaattttacatctgtgtcatagaaaaattaagatcttaatgggagagaaaacctctctactagttccgccagtagccgtatgaccttagcaagttattaatatgtaacttccctgcatttccttacctgtaaaatgtatgatatgtatttgcttcatagggttattgtgacaattcagcgagtgaaatatgtaaagtatttagaaggatgcctggcacaagtaagtgctcaacaaatgttagctgtcattgttactattactattgtgtagggtcaggatgcccagactttcaaagaccaggaagcagcttgacttatcagtgataaacttttcattttgttctttgctcctttctttttataactgctcatctgctctgtattatttcctttatggtgttgctccttcttcttccccatatgtccttcctttgaccycttacyttcttcctttttatattcataagtctttattcattctctagctttsaccacttgcatattcraaytgacattttgtcrtgtttttctctactktctttatgcagcggaccatgtgtcaacttatgccrygtttgtacagacscatagamcaacaggrgagtttakgtttgartttgatgahgatgagmwgttctatgtggatctggayaaraaggagaccgtctggcatctggaggagtttggccrarccttttcctttgaggctcagggcgggctggctaacattgctatatygaacaacaacttgaataccttgatccagcgttccaaccacactcaggccrccaayggtackscctatctttgcctcttcctctgtagcccaactggaagggatgagagggcctctctgccaccctcagactaggaagcctaagtgccccctgctgtgtgatcctcttccmctagtggccatgggctgatcccactacagcaagggcttgcatcctctcttctcaggagagagaaaggtgagcagagtgaggctggtcagtggtgtgatacccctstctgtgattcasagctgccataaaatctaaggctgaggtagaggaccaccctcccctaagaggtggagcctttgtgattcatcccagaagaggggcctaacctggtgctgtctccttccagatccccctgaggtgaccgtgtttcccaaggagcctgtggagctgggccagcccaacaccctcatctgccacattgacargttcttcccaccagtgctcaaygtcacrtggctgtgcaaygggragcyrgtcactgagggtgtcgctgagagcytcttcctgcccagaacagattacagcttccacaagttccattacctgacctttgtrccctcagcagaggacktctatgactgcagggtggagcactggggcttggaccagccgctcctcaagcactggggtatgcaactgcttttctctccataatctcctggcatcctctattccaaagacctggtgtcctctgcaccagctttccgcactggctgggtctcagtcctctcctcrtcctaacatccaattaactggtccataaccttcaattcccacaaccatcccaggccatcaccaccctcactgcacctcctgaccctatctcttcattcttcccccagaggcccaagagccaatccagatgcctgagacaacggagactgtgctctgtgccctgggcctggtgctgggcctagtsggcatcatcgtgggcaccgtcctcatcataaagtctctgcgttctggccatgacccccgggcccaggggaccctgtgaaatactgtaaaggtgggaatgtaaagaggaggccctaggatttgtagaatgtaaggaagggaggaaaaattcaatctgataagtgttcattgatcttctaatgggttaaaagcattcagccrcataacaacaacaayaccgataactaactgagtagttaatatggtcaggcrctattctgaggatttacatttattaactcactttattctcacamatagtctttgaggtaggtactattattttcacyatttcacatgagagatacttacatctttttacatacacagagactttaagcactttgatcmagttcccacagctatgaagtagtagggctagcttccaatccagaaagtctggatccaagactgtttatccactgtcctattcaccctattttgtgaaggaaaagaccaagttsaaattctccagagtccrttgycwaataayggagycagatctatatttctatacataattacaacacagtgtggtgggwgcctgtaactacttactgtctctacttggactcattccatggcaatgytcacacaaaaaatgccyctccagagatcttacaggtttctatytatcataacactcaccatgctttatatttttatatgttttgggaattctcttagcattagacrgtgaacttccatgcagatgaccacatctaattcattattattattgttattcatgctggacctcaggtacaaaaggttaagaacttctcagttcattatatgatcatcattggtgcctccgagctctctctctctcccttgatttatttggtcccttttatctccagtccttactcccatatctaacctcttacccctacctcataggtaaacattttaatgaatttgatgtttccttttatttgcatagatsctcystaatatgtagtagtgtccagtgtacatgtatttttaattaaccaaaatggcattaaattatagatctaattttgtacatccagtttgtttcttccaaatcttccatagtattttactttatatgtccatgcattagtccattttgcattgctataaaggaatatctgaagttacctaatttacgaagaaaagagctttaaatggctcacagatctgcaggctgtacgcgaaacatggcactagcatctgcttctgttgggggattctggaagcttttactcatggtggaaggcaagtggagccagtgcatcacatggtcatagagggagaaagagacatagaaagaggtgccagcctctttttaacaaccaggtttcatgtgcactaatagagtgagaactcactcattacccggagaggggacaaagccattcatgagggtctcctccatgattcaaatacctcccaccaggccccacctgcaacactggggatcaattttcaacatgagacttggaagtgacaaatatccaaatcatattaatccacatatctacattgctcctgggatacctggatcattcctggttctctactattgcaagcaatgcttgtatctcacatggaactgcatatacatgtgggcctgacctgcatccctggaatgtatgtatcctagaaaggggttgcagggttgytggagatgcagctccttaatttgactaaacactgctcatcttctcatcagaatggctgtactcatctgaacttcctttgtcagtactctaattgtcctgcaactcctaaatggacttcaacactggacattatccagttttctaacttttgccaatttcatgtgcataaagaaatatgctgttttattttgcatttctttaattactaataattggggytataattaggactgattagccacttgggggttccttttctataaattgcctgttcacattcattgtccatttttgtactatgtgcttccatcattttcttattgatttgcaggtgatccttatatagtcctgctagtagtcccttgtcagttttaggcattgcaaatgttttcctctaatctgacttctggcaactktctccttggtttcctttattgaagagaaatccttaatattttgtaatgaagtccatcaactgtatttttgtttgtgtgtcttttttaaaagaagtcttccctatactgagatatcaaagatactcttaaaacatctcctacagttttaaatttcacayttactactttaattcatctgggattcatctttgtgtttgatggggatcatgttttatttttctytatataatgggccagtgtgttcccacaactactaaatagttcaccttttccccataggttagtrgtgtctcctttgctatactgaaagctcccattataggtgggcctgtgtctgagttccatcttgttccactgttctgtttgtctcttcttgtgccagtgtcctagtattttgattactatgacattgtagtgtgtgttagtatccagtaggacaaattcttgtttatttttcttagttcacacacatttataattatatctataatgatttgtaacagagtgaagtgaatgtagaatgtcagatgttaagaggaagaatggaaaagagggctgggactagggtgatgtaggggatgcacytggcttaggtgcaaaatttgggggataccaaaagaactcagtaataaatcatattttaatgaaatatcttgaaaaggcaaaattaatgcaaagatacatgattaacaaaacatccaaagaggagtatttaacaaaaatggagaagcagagaagcagaagaattaggagaatatgctgtcacatgagccaaggaattaaagaattcaggaaggaggaagtactgctgtcagatgttcaacagaggtcattttagaaaatttaccttggtttttgaaatcctttcaaagagcagtatacacaatgtgagcaagtatccttcgttcattgccgtcattgatatggtttggatatttgtcccttccaattctcattccagsgtyaagcttcttctctgccctcagtaatgtggcccttccccttgtctgtatattttggagacatgaagcatgtgggatggcctcamagtcagctggggtttgagggtgaaattcaatgactttcgtgaactccttggctcctatgtgctcttcacctggaggrccagggcatgtgcagggatgaccaccttctccctgggacctgaacagggcagagaaatgggaagctcgggtgcaaagggagtggggaagatgggtccgggcttacagtactgaacccaggaatgacaataactgtgtgygttgctgcaggtgacaaaatatctgaacagaagaggacttaggagagatytgaactccagctgccctacaaactccrtcwcagcttttcttctcacttcatgtgaaaactacyccagtggctgactgaattgctgacccttcaagctctgtccttatccrttaccthaaagcagtcattccttagtaaagtttccaacaaatagaaattaatgacactttgrtagcactratayggagattatcctttcattgagccttttatcctctgktytyctttgaararcccctcactgtcaccttccygagaatacyctaagaccaataaatacttcagtatttcagagcrgggagactctgagtcattcttactggaagtctaggaccaggtcacatgtgaatactatttcttgaaggtgtggtttcaacctctgttgccgatgtggttactaaaggttctgatcccacttgaacggaaaggtctgaggatattgattcagtcctgggtttttccctaactacaggatagggtggggtagagaaaggatatttgggggaaattttacttggatgaagattttcttggatgtagtttgaagactgcagtgtttgaagtctctgagggaagagatttggtctgtctggatcaagatttcaggcagattaggattccattcacagcccctgagcttccttcccaaggctgtattgtaattatagcaatatttcatggaggatttttctacatgataaactaagagccaagaaataaaatttttaaaatgccctaattcattgcaatttttaccagccatagtcactccatgtgggagaacttaaatcatgattaccagagctttcaaaggtttgagaatagtgatgattatgaagaaaaatatcttatttgagcaaggattttgtttctttatgagtgttcattagatattacgatgaaaaaagcatgaaatggtaaaaattcagataaatataaaaacatgttctctagttttttttaagttaaaaaaggaattgtttaaagtaaaaattatttgggggtttataacatacccagaagtaaaatatgatgacaatggcacaaagaatagaagggagaaatggaagtataatgttgtaagtttcttatacatgttaagtggtgtgttattatttgaaggtagaatgtattaagatgaatattttaagctcctgataactattgaaaaaaaaagaggtatagccaagaggccaatggagaagataaaatagaacactaagcataattaattcaaaataaagaaataaaaaagggaaagtctggtaagacaaaaagaaaacaaactgtaagatggtagagtttaaaacaaccatactaataattgaattaaatgcacatggcctaaatattctaatgaaaagggaaagattgtcagaatgcacaaaaaaatctacaggccaacttcatgctctctacataatgccctctttaaatatgaaggcaaagacaggtaaaaagtaaaagaatgggaaaatacatgtataccgtggaatgctatgcagccataaaaaaatgagttcatgttgtttgtggggacatggatgaagctggaagccatccttcacagcaaactaacacaggaacagaaaaccaaacaccacacgttctcactcgtaagtgggagttcaacaattagaacacatggacacagggaggggaacacctcacaccagggtctgtcagggcatggggagcaaggggagggagagcattaggacacataccgaatgtatgcatggcttaaaacctagatgatgggttgatagatgcagcaaaccacatggcacatgtataactatgtaacaaacctgcacattctgcacatgtatcccagaacttaaagtaaaaaaaaaaaaaacgaaaataatgccaaccatggaagtattggtggctgtgttaatatcagaaatataagactcagaaatattaccaaggagaaagaaggatagttcataatgataaaaggatcattttattatcaacatataacaatcctaaatgtgtttgttcttagaaaatatgtcttaaatcacattataccaaaaatgataaaaataaatcagaaatagacaaattcacaattatattttagtattctagcactcagtaaacaataaaatatttaggaaaaaacttcatgaggacatgatagatttaaataacattatcaatgaaccaacgtgatctaatcaagatctgtagaatattccacccaatagtggcagaatacacattattttcaaatgctcaagaatattccacaggacagactatacactgggtcataaacacatataaataaatgtctaaataaataaatgtctctattgaaatcatacagaatacattctcggaccacaatagcattaaattagaaaccaataacagaaaaataccttgaaagtcccaaatacctagaaattaaaaagtatactgctaaacagcacctggatttaaaaagagtcagaaggaaaattagaaaatattttgaactgagtgaatatgaaagcacactatcaaaattagtatgatacactaattagagaataatttataactttacataattggaaaggagggaaactctaaaatcaaccatctatgttcccatcttaagaagctagaaaaaaaaagtcaaatgaatcccaagattaataagatcagaaataaatgcaataaaatggacaaacaataaagaaaataaacaaagtcaattgctggttttcaataaggctcaatacattcatgaatctctaggtagatggatcaagaaaaagagataagactcaaatccccaatatcagaaatggaagtgggtacgtcacaacaaatcatacagacattaaaagtattatgacagaatgctatgaaaatgccaataaacaaaaatgacaataaatttgacaatttacattgttaaattaaattaaatttggtgtaaagctttctccatatcttaaattcctacatagcaaactaacccaacttaacataactgcgttatgcaaacaaactacagcctaacttaagagtgttgtaataaatagctgagtctcagccaatcacaggctgccaagtgatcatattatgtcccccataaggcaaatgcctcatcacgccatgcccatataaggcaaacactgagctgtaataaattggctggttttgagtatcacttcctgtttttatctataaacactgccttcacatgttgctggacagagctttctgaatctttctgggttctgagggctccccaattcatgaattgttctttgctaaataaactctgttaaattcaacttctctaaaatttttattttaacaacatgaaatagaaacatttcttgaacgattcaaattaccaaaactaaatcaagaagaaatctctgtcaatggaagaaattaagtttgtaattttaaaaatccttctcacagagaaggccaaatggtttccaggtcagatggcttcattgattaatccatagtattctgtcataatactgtcataatacttttaatgtctgtatgattaattctattatacatttaaggaagaaacaatacaaactcaatacaaactctttcaacaaaagagcagaagaaaacacatcccaataatttacaagtccaatatactaacatcaaacaatgacattaaaagaaaaggaaactaaagacacacaaacatagccatgaaaatgtttaacaaaatattttttaaaattgaattcaataatatattaaaaaggatgatataacatgatcataaaagtttatgccaggaatggaaggcatgtttaacatgcaaaaaatcaatgtgattccacatcttaacagaatacaaaagaaaaattatgtaattatgtaaatggatgcagaaaaaggcatttgctcattcatgataaaaagtcctagaaaactaggaataaaaaggaattacctgataaggtgtgtccatgaaaaccaacaactgaaattttcaattttgggtgggggaggggggcgggcattttactttctccataaaactattaaattatctaatgtgaaagtggaattcagtgaagaaatgttccctactgcaaaaatacaaaatgctggacattctgtgaacagtttctatgcattctatataaatgaaactattaactatataatacatttattgaaaaaagaagatggccttctttttttttcctaatggctgttgaatttatttgcttgatcaataatggtcctggcaaaaattgaccaatgctgagacatttgtaatgaaatactaattttaaaagtccatgacaccttgatagaaattagagtttacacaaacaaaaaaggaaccttcgatatttccagcagctacaaggtgaatgtactgagaccgacaggacagcaagaaggcatttgcacatttatatctgacaccagaccacactttcagccaccagaatatcttctctccatattttaaaaaatagtgtctctccctctccctctccccacggtctccctctccctctccctctccctctccccacggtctccctctccctctctttccacagtctccctctgatgccgagccgaagctggacgatactgctgccatcacggctcactgcaacctccctgcctgattctcctgcctcagcttgccgagtgcctgcgattgcaggcgcgcgccgccacacctgactggttttcgtatttttttggtggagatggggattcgctgtattggctgggctggtctccagctcctaaccgagagtgatccgccagcctcggcctcccgaggtgccgggattgcagacagagtctcgttcactcagtgctcaatggtgcccaggctggagtgcagtggcgtgatctcggctcgctacaacctccacctcccagcagcctgccttggcctcccaaagtgccgagactgcagcctctgcccggccgccaccccgtctgggaagtgaagagcgtctccgcctggccgcccatcgtctgggatgtgaggagcccctctgcctggctgcccagtctggaaagtgaggagcgtctctgcccggccgccatcccatctaggaagtgaggagcgcctcttcccggccgccatcacatctgggaagtgaggagcgtctctgcctggccgcccatcgtctgagatgtggggagcacctctgccctgccgccccgtccgggatgtgaggagcgtctctgcccggccgccccgtctgagaagtgaggagaccctctgcctggcaaccgccccgtctgagaagtgaggaacccctccgcccagcagccaccctgtctgggaattgaggagcgtctccgcccggcagtcacctcctccgggagggaggtggggggggtcagccccccgcccggccagccgccccgtccggcaggtgaggggcgcctctgcccggcccgcccctactgggaagtgaggagcccctctgcccggccagccgccccatccgggagggaggtgggggagtcagtcccccgcccggccagccgccccatccgggagggaggtgggggggtcagccccccgcccggccagccaccccatccgggaagtgaggggcgcctctgcccggccgcccctactgggaagtgaagagcccctctgcccagccagccgccccgtccgggagggaggtggggggtcagccccctgccccgccagccgccccgtccgggagggaggtgggggggtcagccccccgcccggccagccaccccatccgggaagtgaggggcgcctctgcccggccgcgcctactgggaagtgaggagcccctctgccccgccaccaccccgtctgggaggtgtacccaacagctcattgagaacgggccgtgatgacaatggcggttttgtagaatagaaacgggggaaaggtggggaaaagattgagaaatcggatggttgccgtgtctgtgtagaaagaggtagacatgggagacttttcattttgttctgtactaagaaaaattcttctgccttgggatcctgttgatcggtgaccttacccccaaccctgtgctctctgaaacatgtgctgtatccactcagggttgaatggattaagggtggtgcaagatgtgctttgttaaacagatgcttgaaggcagcatgctccttaagagtcatcaccactccctaatctcaagtacccagggacacaaacactgcggaaggccgcagggtcctctgcctaggaaaaccagagacctttgttcacttgtttatctgctgaccttccctccactattgtcctgtga

SEQ ID NO: 8696 - DNA, 30057 bp, Homo sapiens
cccacaggagtgcctcctagcagtcaggtctatacattacaccatgatcctgaaaaactgacatagctgattggatagaggtgcacacctgactcaagccagagcaactagagtctggaaatttgaagacagggctaagaggctccaggtgggaatttcttgaatggaagagagatagaaacttgaacactttagcaacactatcttctgtccagggttgcctgtagatattaaaagccctgaggaaatgttcgaggagagagagaatctatctatagcaatcatctgattacaaaaataattataaaagtcatggacccatgtgagatggagtgatttgctgttaaagagtcaaggtaaggaaaagctgaagagagtcaaggtaaggaaacatagctacttattgtccaatcggtgaacataaaaattttttctagtttcttggagtcacctatttgtattaattattactaaagaaaccattcctgttcaatttcatatctaccactgcaaggaaaaggtagtaacactattatcattcacaatgcaatggctcttcaggtcctattataattggaaccgtatagatctttttgcctctgcagttccataatgccatttatttaatgctgattacagcattactcatattgcttcaacatccattgtactgcctgtgaacactggatactaatgactcaaatagtgttagtgtatttgttcatgatgaccacaaacacaggtctcacacagagaatgcaggaaaatgcaaacaattattcatactgtggtcatgttaaatttattgtttggaatgtattaatagcatttatttatagaacttactgcattaacatagaatggcatatctctcaaccatgtcctctcttgaattgtctagaccttaatcactgcatccctagaatgtgactcttttaaggttggctgcagccctgctttccatatatagttatcagtggtgaagatagatgagaggccctggatagatgaaaagagccatcccatttgggcaaccagtgtccatcacttgttcatcaaggcttacaaccaacccagaagagaatgtcaccatgtttattagaggtaaaaaagacattgattgaaatggcccattggctttgtgttgctacagtctcaaaagccctgaaaggaggcaagcattgccatgataagtagtgtctgatatgtgacacggagcttgcagaggggtggtgtgactgccctaatgccagcagcagggtgacggcaggagaccccaggataaaggatgtctgcagacacacatacctttttcaagtgctctccactagaggtggttccttggtctgaccagtcagggaagagcccacatactggctcacacagtcagctccagaccaaggatgcatggggggacagtggtagcccagagcactgaactcatcctgtgtctgatattagtgaaaatcaccctcaaaccactgaaaaagcatcattctggtggcccaaacttgtgcgatgaaagaaataatgccatgaaagaaataatgccccagccagtgggagctttggccctccaagttgctctccaggaactggcagggccatctggccctaagccaccctacaggtgctagtaccagagatcctgctgcactggtggaccctgagcatgttaagagggcaatatggtcaggagggcctgaagggaagaaacaaagaagccaataacattttctttaggcttaggactgtcccacccaacaggtcctgctgacctggctggtccccaccaccaaaagcaatagaacatctcaggacttccactgtccaggacccacatagtactacattttggctccatcctgctgaatggtccaagacactcgaggggaattagggcacctcaaggaaggccaggtgcaggaccaggctaggagccctggttgcccaggtctaagggcagtattgctttttttttttttttcagtcttctgaactaggtaacagaaaagctagtctgaggaaagaataacgcatatgcagaacaaattcagcaaagagacagagaaagggtgctgcttgaatagaggatagtttcttttaggatatttctgaaactgcattcctgctctggcattccatcaaacaccaccttctctttataatatgctccccctttttgttgtttaagtcattttatttttatttttgttacttgcaagcagagtgagccctaatgcaatatttagagccagattcttagctttgtaggttcagaaactcaactttaccatttccaccagagctaatctcctggggaccaacatattaagaggacccataaacaactgatatgcatttcagagtgccaatttctcaatctataaagagagcttaatccagatgaacaacttgtgtggataaattcactctgggaatttcaccacagtaggttaagtgtgctcaggagagaagacaaattatcagagggctgtttggtgagcatataataagaataaagagaatgggtagaatttttctttcaaattaggatagctgaaatgaatttcttttgtaggaatatttctctttgaaaaatcagctaaagtccttgaactcaaataacctcttctggtcattatcagatgtattcacgcattttgttcattatcctagacttactatagaggatttttctcttgacacataattctcccagaaaaattttgctaattacagttagtacagttgattaactgttgttgcattaactgcatgtcatctaccagctttggcatctattattcctattgaccccatgaagtcactatctcctctctactcccaagggtgatcactatccaagattagtttggctgcttttgaacttcatgtaaatggagtcatatagcatatgccattttgtgtcttgcttttttcaattcaagactgtatttgtgagtgaaatactgttcaataatctgagtgtaatttgttattcttgctactgtattacacattccaactgtgtaaacatatgacaatttatttatctaggctaccactgataagcaattgggaagcttccagtttgggctattttgaatagtacagctctgaacattactatatacatcttcagtgaacattatgtgcattcctgttggtaatatacctaaaaatggaatttcagggtcatagtgtacgaaaatgttcagatttaatatattccgacattttccaaagtagatgtatcaattactttttgcaatgtatgagaattacagttgctctacatgctttccaacacttagtattctctgatttttcattttagtcagtttgatgaatgcataatggtatcatatggttttaatttgcattcccctgacttgcagtaccaaccaagacatagaaagcccacaataacctatctttcctaatgattacagtgagaaactcaagacaaaataccaaaagcaactgcctgaagactctggaaaaacaaaaacaaaaacaggtaaattggagtggagaatgaaaacctggagaaatgttctgtatgtttgcttttcctcttttctcacagcttttgacctaaggcccaacacctagtgaaactgtggtgacaggaaaaaccgacagaaacctgtatgtcttgccagaatggggatagggggcttttgtgagccaaaagttagtcgggggaatacttagctccccctcttctggtttttctttcttttttttaatttctctctctctctctctctctctctctctctgggcattggcccaagagtgaggccctaggcttggatatctacaatactaacagaagctctgtttttatggacaaaggaagtagaaaaggaggcctttgtggtctgaagagtgtagagggaatccacattttttctctctcttttctgtcactgctttgtctcagaatctgccctagtcagctgctatgccaggctgctaaaactccaagaggaacctcatatttctggtgagaggaccttgcgagacaaaaggagaagaatgtaagaggagagagctagagaagaggatcccctaattctatgtatgaacctatacaagttctgtgttcacacctaaactgaacacgtgcagaacaaacacaaaatagcatagcaaaactgaatttcaatttaaactactgctaacatccccaaataatccctgagtattgtaggtataggacacagcaaagcctttgaaaacccagctgacatggaaccagtactcatagaagatgagaccgaacttttgacctgaaccaaattggatcgattgccttctaaaacaaaaaaaaatcaacattccctaaaggcttttaacaggactcagtctatgcaacataatgttcaaaatgtcctagataaaatccacaattacacagtataaaagaactggaaaaatgtgaccaacttgcaagggaaaatataatcaacacctgctaactcctagatgaccaaaatgttataatacagattttaaagcaacaatcataactagagagtagttgaacaatttctctcctaaacataatcatacttgcataaagacatttcagtcaatgatgaaccacatatacaaaggtggtcccataagattacaataccatatttttactgtacctttatatttagatacacaaataccactgcgttacaactgcctacagtatttagtacaataagatgtactaaatgcaggtttgtagtctaggagcaataggctataccatatagcctaggtgtgtagtaggctatacctgctaggcctgtgtaagcacattctatgatgttcacacaacagcacaattgccgaaagtggcatttctcagaacatatccctatcattaagtgaggcatgactgtatatgctgtattctaaaaaaaattaatgcatttatataccagaatctatgcataagaatgctcatactggtgttgtttgtaataccaagcctgagaaacagaaggaataaactgtcacaaaaccacaaaacggaatagtatcagtatacatcagtgcaaataaaagaattacacctatacacttctacatgcaactacctaggattaatttagaagcataatgaacaaaaaaagagtacagaatcaactatgcttacacagctcataaaattaaacatacatgtatgttaggttttgaagggaaggcaaggattaaagaaagagagggtggcttaacaacaaatacaggatttatgtccagcataagacctacagaggtgggagaccagcttaatgccagtgcccgttgcttcttacaggctggggtgatttataggcctgggtgggagtggtctggggggccatggcctgcttcctgggaacatgttgataaggtgttcccaggacgaggcggctctggcccttgttccagtggaatgtggtactttctcccagcagagtataagaggcagcctgtttctcacgcccgaaccccgtggaatgtttcactttgactaaggtctgcaaaatggcaggggggcttacaaaaatggtgcagtttggactaacaacgtacataaatttttaaaaagcaaaagaataaatcccaaatatgggaaagtgttatctgtggaagaaagtaatgggatggtatcagaaaagacactggtaatttaaacagtgttgacaatgtctcagttttaaaattaccagctggttcccatgtataagttgcttacttatctgttacacctatttatgtatatataaaaataggtttccaaacgacatcccatgtgtatgaaataacagaatttttatgccttattaaaataatttctctaaacacttgaagagcccgagccgcctcttaccctaaacgaaccccacgcccctgaattgatcagtcacttccgcctccacctttccagctccacctaaggaagcggaagtactttactcttgggtcctcccacctgtagggggctctccgaggcttctagtgccacgaaggcctcctgcctgggttgtccttatggcgcctgtgagtttagttctagaaaagatatttgtattttaacttttccatctaacaaacagtagcacaggcatcttagtctggacaacaacgtacaagctgaattcctggctagttccctcattatcaaaccctgacacagtagtaggcgcgagtcaggcagtgtggggacagccccgagttgccgaaagtccccggcccgttttcctcctgtgaagacatagctgcgggtggctgtgctggtggcgttcaagatgtcgaccaagaatttccgagtcagtgacggggactggatttgccctgacaaaaagtgagttcaagaagggtcctgaattgggacggagtttgttagtggaagctttccgaggtccgtccggcattttccttttttatgattttctgtgccttaagacgggttgaggcggcgaaccgccagttccctggcgggaagaaggctcccaatctcctcacgagagaggtctttccgggagcctttgttctagatatgtcttcagcgtttcctcgacattacctccgcaaggtagcctctctttttagagtgcgagatggcctacctttttgcccccacccccctcccccgccccggccaggttttagcgataggaaacctctccagtcaggccagcttggtgttggatctcccccacgtgacttttctctgcagaactttactcttgttcacggaaaatattgctttctcgcactcgtccttttgcctcttatagttcaccttgttttgtatttttactcaaacttttcctccatactattttccccttttccggaagctctaccctcttcggtttgggaaattctgacattttctttgtggatcatttctccacaagaattgggcttttcgcctccttagagccgaaaaggagggaagaggcctgtgtttttgcctactcagcccttaagatgcctgcagcagagaagcacgtgtgttagtggctctgctttttgacattgttgccaaagccagtactcgactagatagttaatcagattttttttgaagggtgcacaaataggtgtatctattcggaaataacatggaaaataatttaatgtacaactcatgttcacataaaagccttttatttgttgtacctaagttagccacaaataggttttgattgtaaaaagcaaaaactttgaaataaacctgggtttagttaaaattctattacttatttaactgctaaaaaaggaatagaattttttttttaatgaaaacatgaaataacatggatagggtgtgtaaacagtgacgtgtagcaaattctaattggtggctattgatagtaatttgatattaagatgacctgaaggagtagttcaagcctaacaaatgatactgaatagaaccaaagttatatgttatggatagtattgctctgagtggtaagacattattgaaaacgttcaaaagatttagaacaacaacttctgactttgttgttacctgtaaaataatgtgcttttgtcagtgtctttaatgacagcacacccagaggtaggactctcaatgagagttcatttcaactcatttacaaatatatgaatagaatgttgtttgtacaatatgtttaaatgcaggataaattttcagagtatattttccatgcttaatggagttaaaaggaatatttttaggggaaaaacttaacctaaatattatttagagtgtttcactttagtgtcatcccatacttcacatctgtattgtattctagtataatgccttaaaaatcagctttttaaagtttaagcattccatgttatccagagcatttaacatacttttaccaatatacacgtacacttctaaggtcatgtgagtgaaccagtaattctttaggtttgagtttgttgagtataagcataaagtcttactgtactacatgtgttgagattattggttttggtggttgtgtcatttttttcagcgaagtctcagaggtttgagaaatgccctgtaaaactcagttttcttacaattattgaatctttttgtatttttagtcagtacaacctatcatatttggttccttagcatcctacctactgcatgtaaaaagataatttcattaagatccatgaagccctccttgatttataagtttttttcctcattggtccaccgctagggtttaaaactccctggtagcttgtaagtaattagtgaagtggagttaactctcactttcaactttgtaaagggattataactaatgatatgtgctaatgtgaggacttgaggcagagatcctaagtaacttaatcaagatcacatgactggtaaatggaggattgggatatcttattctgaatttgtggctccaatcaagtatttttcccccagtaaattgtgtggagttttttgttggtaacattgacattaacatgactaagatggattagaagttatgaattccagatatgtagtgaggacaagttaaaatgtaaaattttacaaatttaaatttttataaatgctttttaatctgtttttagatgtggaaatgtaaactttgctagaagaaccagctgtaatcgatgtggtcggggtaagtatttaaagaagattctatttatactgtatatgtatcatttatttatttctccaggttcatattgcatgatttttctgttttcagagaaaacaactgaggccaagatgatgaaagctgggggcactgaaataggaaagacacttgcagaaaagagccgaggcctatttagtgctaatgactggcaatgtaaaacgtatgttttttaaattattgtctgctctttcttccaaaataatagatctggccactacttgtttatattayagctcttattagtgacattgacaagccagggtaaccttttaaatccaaggtattgttattcagtctcatctttaagtatagtataaagaagttttaaattattctttgcattttttaatggtaatagttgtcactatgatggattatgtataccagtaaacaaatgcttatggtaagctcaaaaccaatcgkggggtggtggtacttaaaagtactaaggcctattacttcctttattgaaaaatcccaatttttagactgtatagttagtgtgaaatacaccacaaaactcattttgcctgtttacaaaataatgttagattcataagttgtgtgccgtaagtaattaagtctaattataggtaggtttcttaatgatttttattttcaggcttagatttaattcttcattgatttttccaacttccatcttttctctatgcagatgaatcctatgtgtatgaaagaggtctaaatcaaaaaagtattaaataaatttctctttttgtttgtttgtattttttgtttttgagatgaggtcccactcagtcacccaggctggagtgcagtggggcgatctcagttcactgtaacctctacctcccaggctcaagcaatcctctcacttcagcctccttagtaactgggaccacaggcccatgccaccatgcctggctcatttttttatatttttggtagagacagggttttaccatgttgcccaggatggcctcgaacacctgagctcaagcattctgcctgccttggcctcccaaagtgctgggattacaggcgaggcatgggccactattcctgaccctagagtcttaaataaatttctgatcctcaggattataaatttgtattggaaaagtttccagctacagatttggtcactggatttggtatgctttggaattcagtgcttgaactgagacctcaaaaaaataaattaatattatttatagggtataaccatactctttaaggtatattcagagactgagaaattagtggagctgttaatttaaagttatattttttcataagacatcagaatttctatacaggttcagtatcacttacctgaaatgtttgtgggttcagcatccctaatctgaaaatctgaaatgctcctgtgagcgtttctgttgagtgtcatgtcctctctcaaaaagttttagattttggaacgtttttggattttggatttgtggattagtgatactcgacctgtggttataatttgtcatttacttctcaaaatgacagaggcacttttcatactatataaattttgcttctctgcttaaatggttcagtccgttgttggaacccacatttactcttcaggccactgtacattttctttgtttacattaccacttaataaacatttctttgacagtggtttcatcctagtttttattttaaaattgtaaaatatctaaaaatttgatattcatctatattatagcctactaatttagtatttttcacttctaaagttgcagcaatgtgaattgggccagaagatcagagtgtaatatgtgtaatactccaaagtatgctaaattagaagaaagaacaggtatgataaaaccacattgtaactaaatgattttttttaaagcactaaatattgaaacgataattgtatcaccttcgagtaagagccacagtaagtgaggattctgtttattctgccctgaatgtttgttactgggatttttttycccccatacacacatacaaatcttttgtttcacaatttayaaaataacagtgttagggacctttatcctaacaaggarggacataagaatactttcagaaatattctcctcctctccctttcactggtttgcatgtttgttattagtaatgatataatgataccatttttaaattcttttgatagcctgctgtgacttaaagggcaaagccacaccatttaaagtgttcttctaaagctttggcagtaattctgaaacttaagctatgtgctagattatctgaaaaactttttcaaatatcgattgcaaaatgcagaactgttaaagttatttggcggtgggtttccaacatctgcaggttttttggatggtgtttgataatcattggcctaaataatagttgatcattggctttgtatgttactggtgaaatgaaaatgtttacctaatagcatatagtttttccattatcaccaattagcccaaccacattatctgtttacttaaaatctgattttgtctttcaactgcttatatgtcacatgatcaaaggattccttctatatctagtcaccctgtcagacttaggcttggtgaactgcttccctgttttctttgcctctctaactttaggccgttttcattgtctgtttagtttctagggatcagagggccactgttcaatcttttcgacctagctcttccagacttcaacagaaattctacttttatccccccccaccccttttttaaaacttacattctcatatgtgagaacattataacataatgtccttgatccccccttccccagcccaaccgccactttcaaccctcaaatcctgccttattcttaggaagtgattttgcctttccaccgattgggtaagttaaggccttctgacaaggatctcgtttttttcttccctcacctaaggtatgcaccgtacctccttcaccgcccccaccaacccccgtttgattgattgtttattctgtctcctttgcaggtttctcttcttttggccactgatgttgggattcttcgcagccatccctggccctctttctttcctctattttcatggtgttttcttctaagcccaaagtttaagtaactttgccatgataacccaagtttatgtctccagctcagacttctttgacccatatatccagctgcctattcaacattgccatgcaaatgtcaaactcattatattcaaactgaatttgtgattttacccctgggacctgaccctcttccaatgatctctttctcatgattagtaccactcaccatacatttattacataagctggaaatctagatgtccttcttagcctaaatagccctttcttgatatctcccataccccaaaaattcttttccattaccaccctaggcaaagaattactatgttttgtggaaaaatagccacctagctggtttctacatgtttttatttccaaatttaaaatccttttttaaaaaacccattttgattgcttttaggataaagtctaaaatctttttaacagtttcaaaacttaaaaaaactttgacctatttcctgactcctttatagtttcattatcacaagaactatagtttaacagagaagtaagcaaattttatttgataacttctcacttttcttattgtcatttttcagtcattctggtgtcttgaacctttctcacttcccttgctacaagtatttgtctttgctggtaacagttgaaggtgtgaaataacttactctgttgctttccgctttcttttggctatttgtaataaagcagtgcagggtttggggagcatttcctaagcatgagacaggatatgaataaaagagaatgtgattcactacctctgaaagattgctggcttatcctgcataattccatcaaattgttcagtaatttacttctctgtttcaggatttaggattatttttgtttttgtcagcttttttttaaaaaaaaaaccattaaagataatggcataaaaacaaacttagtacattgtgatttttattcttttggattctttccttagaatatgttctcaggagttgaattaattgttcagggtgtagaatcacagagttttcctgttagtgccttagttcttcctttgaagtacatgttatattcatccccctttcccgctttttttccattgtcacaatcttgatccaaacattcattttaaacctgtgtttgattctttcttggcccttgctcagctttttacattatactgtgagacaaatttgaaaatatattcattgtaagacttactaaaatctacggaaattcttggttgctttctaaagctttccatagaaattcaaattcattagatgattccagaattgtgttttctgtattcattccttgaagacatttataggccactgtgcaaggtgctggggatacctaggtgagcaaaagagtcttacagcaccaaagattaatgaagtcctctttaggaaagctatgcttaagctaagaagtgaaagatgagttacctgagtaatggattaaacactcttctttctgtttgtggagaagtaattaggagaggtggcggcaagagtggaaataaaaccaatttatacagcattatctgaagtgcttgaaattagtagaatgacggaaacatacatatcattccattgattccactatctcaggtattcagtgaaaatggtatgcttcagttttttcacgatagggagctagtgtattttccatttatacagagttaatgagctagatttatattgtatgggttcatagaacataccttaccaatgtctttgttgtcagcagactattttgctgcctcttaaaataattttatttacatacttttgaaaaattaactactagagttatagttcactttctaattttactatatttttgagctttccatatttgtcatattacttttcagttttttcctatgtaaattatttccaatttagatcccacgtatgtttaaaaatatttttattaacttccaagtattttgaagttttcactagtacaaagtataatgaagaaaagatgctatattagtgtgggtttttttcagaaagtgaaattttaaaaatatttttttaaatatgataggcaaattttaagttacaagtcctaatttttataaaatatttttattataaatctatttaatattttgctgatgaatgaagtccctaagtctggaaatcaccggccttattgtactgatactgctctggagtatgtgaccagttagattgtattactcttgatcaacacatacctctttaattttcaatgggagactttttcaaaatatgtcaactcacttttcctaaaactagctcattttctttaattccagtctctcctttaagcttatgtcagagacctgccaattgaattgtatacattggttgtgacatgagagaatagtggtttgctaatctcaactactttttaatagaatcatttaatttcaaaatttactggctacttcagagaacctgtgtgacttttacctatgtgttaaaaccaattaaaccagggccaaaggatggcctttattgtgttattgtgtttgtctgtgtaattaggaattttccaagctctaataaggcctgctacattttaaagtagcaaaatttcagaatatcagaagatttcagactatttgcagttggtaaacagtggaatttaatgcttggttgttactgagcccacccttcccagaagaattacgattaactgtagaggaaagtcctttaaaacttggttatagcagaagtttgagatgttttccaccaatactttctatgaattaaataagtcatgtagggcaatttggaattgaaaagagctagaagtacagccatatgacgttacaactaagttctctgtattttctgtggtgatttctaatatgctttctaaagactagtaatttattagatgggtaggcagccattgttgattagatgttttttgttgtctggagatttgggcatgatgtgtttattatttaaatcaattgtcatagggtaacaatttgtgccctcttttttaaggatatggtggtggttttaatgaaagagaaaatgttgaatayatagaaagagaagaatctgatggtgaatatgatgaggtaagctatattttggtgttcaggttgaatataaattagaaaaacagaaaaaattcttaaatgcaaaggaaaacaaacttttttttaagtgcaatttgagtcttcagcaactgatcattttcaggaaatcataaatatctaaaataattttttagaaaatgtattaagtttaatrcattatcagctgacaagcattttgaaattgtttttcyctagtttggacgtaaaaagaaaaaatacagagggaaagcagttggtcctgcatctatattaaaggaagttgaagataaagaatcagagggagaagaagaggatgaggatgaagatctttctaaatataagttagatgaggtgaacaattttcttgtcctatttcccttttgtcttattggagttataccataacatgaatgcttttgacagcctcagacacttggtgaaaatatattctgtgttttcatttgttctcacaaaggttttggatttccactctgccaagtactatttgtacttggaacactactgttctggagatacagtggtgaccgaaacagaaccagttttctcttacacagttctagaggaggaaatatataaataggtaattttgatagcagtaacgttatgaagacacatgatgtgataacagtttaaaagcaactttggttttgccgatggataatgtctaaggaggtgaagtttgagctgaaacttgaatgataggaaggagccagcaataagagccgaggtgagagcacatttaggcagagaacagcaaatacgggttccctaaataggagataagccagcagccttcaaaaataccatacataggccagtatagttagagcagaggggagaatgagatgagggggacagcacacatttcaggtctggtgatacttgttctgtcaggccagagtgtaagttttatgccatgttaagggtaccttagagcctgatcataagaggtcttggaatgcaactaaagaaataataagccagttttgaagtttttaagaaaaaagtgagatgtgtttatctgtcctgtgtttcagagtgatgactgtcagtatattgagatactagagaggcagaatggatcttcagatttgaggagaccagctaagaggttactataatatgctagagaataaggaacagagtgtctaagactaaaaatggtgatttcaaggacttttaaggaggtggacttgaaaattcttgggtgatgcataagtgtgacagaaaaagtgtgtatggcctccaggtttatgtctgtgcaatacctgagacaaagttgtcaagtctstatttgagatgagtttagtaggtgaattttagaattcagaattaatttgctgagatacctgtgatatatgcatatggaggtgctcagtacacctaactgttttatctttcctggtaggtaacactaatatctaaatgtctaattataattgaatttttgttaggatgaggatgaagatgacgctgatctctcaaaatataatcttgatgccagtgaagaagaagatagtaataaaaagaaatctaatagacgaagtcgctcaaagtctsgatcttcacattcacgatcttcatcacgctcatcctccccctcaagttcaaggtctaggtccaggtaaacgggtacaggtcaagggtaacaccagtcaaaatgtcagtatctaacttttttatttataaattttgttttwcttgacgaaataaactttcctttttattttaaaaatttaattcaaatcaacttttaaaataatttttcagcttagtaccatacagttgtygtccagtatttttagaaaagtaaagtcttagcatgaaacttccttaayctattttagcctcatgcttttgactaaaatagacttaaaaactgaattaaatttttatatacacttayatttaattaatctaaagagatagcttacatatagaaattaagtaaaggggagatctgtattttcattcaagatgttaaaggctagcacagaaattttctaggcattaaatcattgcttattacataatgtttttaatagtttgctttgatatcagtattgtgaataacggagcaaattcagccatattagttctgttgacttcatgctcataattttgagaagtccaggcgtaaactaaaactcttttggtgtacttgaatattctttgtttgttgatgtaaaatatgtaatctctgattttatagttaacaataaaaataaaattttaggtgagtgaaagcagtgatttaaatttaacagtgtcctcttgaaaaaccttaatcacagttaagtgatggcatgggcaatgaattttaatcatatttaggaataaaatactagatattagtgtataacaattagatatatgttaattgagcactacaaagcctgaaagcttaacaaagtggggctataactagtaattttttggtaaaaatatagtgatctttttctacagggtattattataagggacaaattatagttgtaaattagattaatgaattttgtgagttttaaartttgtacgaaccatgtctcccttgtgtcatattttccaataatataattacctaacaatgacagaattatacattttccctttaattctctaagcattgagtaaacagaaaaatatagggatgaaatacacacatgccaacattcaaaactttgtactaactagaaacaaaaatagaaggggatttataaaggaaaatgatggagacattttagagaaattaagtataaatcgcaacattctgttttcttggatgtattctgggtagcttctagttacttgtaaacaaagtattcattgtttttgtaataaagtgataatgttttgttttatagttgagtggctttagggtaatttaatcacctggaaagtgatatttttttaattaccttttgttactaaatcttatctaatttaaaatactatgttttgaaagtatatatcttgtatagttatctttttatatgaaaatgaactctaatacatatctttctttcagtgttcatatcacaaagctcaattaaatggtcctggaaaaaaaaaatcgttccatgttgttccaggtcccgttcaagaagttcttccagttcgcagtcaagatctcgttccagttccagagaacgttcgagatctcgtgggtcgaaatcaaggtgaatgaggtagcatctctctgtaaagcagagagaaaaatatttaaaggctgcagaaggtgttgctgctttttttccccttattttgcttctacttgtcgattttattttagcattagaaaactaatgcacttgcctcagcttaattttctcaccatgaaatgtttccattgccagcagtgtgccaagacattcccatgattgaaatcaggtggctattttgcaatatgcagcgtttattattttggcactaagatgttatgaagtaggaagatgaagccaagtcttatcgccacatctctagtatattaagattatatatggccaggcacagtgattcatgcctataatcccagcactttgggaagctgaggtgggaggatcacttgaggccaggagttcaaggttgtagtgaaccttgatcacagcactgtaatccagcctgggtgacagaggagtgtctcaaaaaaaaaaaaaattaatagtagttcaaataaaattacatatgtaaataaaaagaaaaattttcttcattattaaaaggaagaaaaataaccctgcctcaaaacaggtcctgttttgcacggcagttgtttcaatattttcagaaacaaatttgccatttatatcagataaagttactagagtactgtatatacattttcctttctaattttacacacgctattatttatagagcacaaaacactcaaaactaaatcaggaagtatagtcggttagttgagataggatgtggtcttaagtagtaaacagtgttctaaagtttcaggttgcatgtagtcacatctgtagagggaaacataatttgaaagatgctcttgcaggaaatttttctttgtttagtcaaaatatgctctctttktttttaagttaatttattatgacctaaaggcatctaaaaaataaataagaaaatgaaattccatatttgtggaaattcatattgaagtctaactgtggctgttttggtaaaagtatttgctgctttgaatcaaatttagcattaaagggctgccacagtataatcatgttaaggagaaaagaatgttgtgcacacttgcattataagccaataagaaatagataacaaggccaggctcagtggctcacgcctgtaatcccaataccttgggaggccaaggtgggcgggctgcttgagcccaggagttcaagaccagcctgggcaatatagtgagacctcgtctactaaaaataaaaattaaaacaaccagccaggcatggtggtgtgttcttataggctgaggtggaaggatcactggagccctggagattaagggtgcagtgagccatgcttatgctactgcaccacagcctggggaacagagcaagatcctgtctcaaaaaaaaaaaaaaaaatagaagtagagagcaaattattttttattgttaccattatttagtaacaatatttaagcgctttataggtaaaaatccttaagttctggtattccctttgggaaccattataattaaggtttacagaacacccatcatattcttcccaaacattttttcattgcttgtaactttccaaagaattctccttttgggctttctggttttattttaagcccaaaggtgaattttttgggaagtttgagctaaattccttcaaccaaaatatacaagtgaagaaaaaaaatttgtatttaaacatttgcacatttacttctacctgaagcatgtgaatgtcaacacttcatatttcataagtagtgggttttcataaaaatagtattgtaaatataaatcatcttaaagttagtttttatttcttcttgaatatttagcagttaagtacagttactagtcttttgttgctgtgccatatacctggtttttccataacagtttaatgagttgaataattccacatggaattatgtttattttcctcaggaagtggtatataagatacatattttaatcctcaaatggaaggatgtagttcctaaacgtaaagtcctgttaatgcagttatctgctgattttataatactataatatttgtgtatactttgaaaagccttaaaaaaagtttaaattctattttgatatagtaagcagggttttaattacacatgatagaattttaaagagayaaaattaaaatgtttaagtagaatgttttcatggttgatccagaagtcttctgttgaataagcagtaagtattcttccttataaaattttcatagttgttataaatcctgtttatttttggagctatctgataactaaataatcttccttatttcttcttttaatgaaatgtttgatttgtttctcaatcaatgaagatccagctccaggtcccacaggggctcttcttccccacgaaaaagatcytattcaagttcatcatcttctcctgagaggaacagaaagagaagtcgttctagatcttcttcatctggtgatcgcaaaaaaagacgaacaagatcacggtcacccgaaaggtttgggtttctgtagaaataagaatgggtgttcttaagtgtgtttaatagataaagtaaactttcctagtcaagggttagatttttattatctcttgtgttccgactttctacttttcaactttgaacttcaaaaaaacattactttgcttatcctttgtactttgatcrggttgtttagaattgtagatcaaaccattctttgatcattttattgtttaaatttttagttccatttataatttttatagccaactctcggttatttctgtcttttgagattgcaattcagaagctgtatgtcgaagtaatttatgagttgacttttatacttaggcttctttaaatactaatagtcaagaattctagagcatctaataaaaaattaactttcagatcattgggaatctgtcctcatttaaatatgtgtaaatgcatttccacagcaaattgcttcatgccctttgtctataaggaaattattccttgtagctaatacatttttcattttgcagtccaaatcttttttgagaaaggcctatattaggttactttatctgtactgacacttttaatattggaagaatgcaactgtcatctgtcagccttttctgcaacaggctaattactcagtttcattaattttctctttgttcccaattatatagtcattttaatggctttatttgtagtctttgcaaatttttcatattttattagcttgtgaaaataaagattatgtaaagtctattaattgctgggttcagtggtaggattatctcatgattcctacttgtacagaatgattagttttgcttcttcacattttggagtttagatgttaagatttcacacagtcttgyttctctgcatttgtttctttgtaaaaaaaattactctgtttttgagtggaattcattctgttgctttcttaccacttctgcaaatttttatcttagccacatataatccccctagtttgttgtcatctaaacttaatgaacatgttctctattccataagccaggtgattggtgaaaacactaaacaaccctgagcccagggccaacccctacggaacaccactactttacccaggttgatattgacttattcatactagctgcatgaatataaccctatagcaaattgtacaatcatcttgtgtgacctagatttccaaaacttatttatgagtatattttctcatacacagaagccttgctgtatcttttttacataatagacttcttacactttctacaccgtgtcacagggattggtttagtcacacttccattaccaagtttatatgcttttgttgtacattttctgtaattttacacatttttgcaaggcttttctttgatatcttaaataattgagaggtggctatattttgaaatgagattcttttgaaattgtagagaattttttattgtatttatatgataactgggctcatatccaaagtctaaacatcagataattttatgtgtgtaagttcctatctcaatttttaatttttttgctagcatcatggtactgaattttgtatactttcacagtcttaagaatgaatgctgaratttagctctagcttactagaatgcctactctctccattatgtcttacagacgccacaggtcatcatctggatcatcccattctggttcccgttcaagttcaaaaaagaaataatgtattaaaatttacatcttaaaaaaatccagtacagtgcatgaagcatatttttaaagaagttggtgtcttacttggtcagaagtgctaaatctgctagtagaggtgcatgcctttcattgcttttcaaaacaatacagctgtgtttatttgtgaagttaaaagtaaatagcattttaagccataatgtcccaaaatagatgttctgtcattcattatttacaaccatttgcttcatttaaaaccatttcagctataacaaagtactttgcttcctaatttaaacccatttttgtcatttccaaatacatcctgtccattggctaagacaggattacctaggcttgcctgaactttgggcatggaagaaagactggaaactagttggaaacaacatacttatggaaaagaaagtcagcctttttatgctgttaacagatgtcagagtgattctcaccaaaaaaagttaaactatgttgtaagcagccaactgtaaatgtctattttgaaattccytatgctaagggtgccttagaatcattgtgtctcttttatccagctttacttttttgctccacatttaatgcaaaagaatcttgtgatgtctacaaggagagaagtgggatatattttcctttctgacacataatttggggcaaaaaagaaagtcttaagagtttatcttttctctgctgatacggttgcttgataaagacatctcaaaatgtttaccaatgttttaagaagctttgtgtgatattcttccaaatgtagttaccaaatataatatggtagaaaaggctaaatcatacttaatgagcaaattgaagtaagcttttaaagtatatttctcttttggtgaaaggccaatggagacattgtgaatttaagtgaacatttgcctcaagatgttaactataaacacactgcatacaattttcttctgaataacaaatgaatgcttattgctgcatgatgtaagcaaaagtcattatttttcctattcatttgaaataagttatggcttaaaatgcttttggagtttatttctcaaaattaaaatctggtcacatgagctttagtttgttttctggtttaaaaaataaaaaggtttctcttaacagtatttccagtgacaatgcaaggtaagtatatcaaaggaaatcaacagttgtgcttgggggctttttgttatgggatattgatttcttgttttttttccgtaacattgtctgctgcaatttaaataaaaattacgacattttaagatatttcatagacaaaccaaacaaaaawatatgtttttactttaaagtgaatgtttttctcttcagctgatctaaaaatgaaagcaaratatcttatgtagaaatattttgataatatttttacagtgagctttcccatgtttttatgtcttaagtttctttgctgcgtttatgtaggttgcacaagaacttttactcacttgtaattgtgcctcagactttttgaaagtctaccttctaaattgccccgacgatctagattctacatgttaccattggtttattcttgtgctttctgtatttaaaactttggctgtactaagcaaatgcaaggttataatttagctaatagtagtttacagacaattctgatgattatgatttcatttggtttaactaagctgtactagttcatttcataaggaaatgatactgtagacaaatgtaaataaagcctgtgagtcaagcatcaagtggtgtttgttagaaataaactagagatttttaaactctgatctaatgttcatttttaaactaattacagttttctgttacctttgatttgttaattttttacactctttatattcacctaccttttatatatgagtgcttggtattttaaattccaaagccattatcactgcaacctcagaatttttaatttaacctttttttcgttttaaatagagagctcctaaattagttgcacacttcttgccagaacattacatccctcattccatgtggtaaaataccatatcgtagtgtgcttcctgaattactcttaaactgtcaccttatataaagcactcaactgtcagcttaacagctaagttttcttaagtttctatttggagtcctttcatctaaacaatattgaatgatatctggtaataaatgtccaagttcagaactagatctaaatagaagatcatctctaggcacaattaccaagctaaattagatctctgaaaccatgtcatctccccttcttgctatcttgtgtacatagccagtgttgtggatgttggtaagaaggtagggaatttctccactttgccccctgtttttgacataaggtttaaatgttttttaaatagaaataccctcatggctttcctgacctggaaatggtatttctatttctggggaaattgagtagacaggtttaactaaaagacagtttcgtgtgtgtgtgtgtgtgtgtgtgtgtgtgtgtgtgtgtgtgtgtgtgtgagagagagagatttgcaggcattatctaattctccctatgatcttgtgagagtatatactcttgcatatcttgtgttttgcgaaaaggagggttaaagcacggggaaattaaaaacttgcccaaggaagccacaggaatagcaaagtagggattcacccccaaacatgatgggaaatttcagtattatgtgtaataaaagccaaaactcttttgagaaaataaatgtgaaattgttaagcccgatagtcagatattttttagtctggtaatttggtagagaatatataatttcagccaattatagtcagggaggttagacaaacactattttggataactttagatttaaagaaaagttgcaaagattgtgcagacagttctcatatatccccactaattttctacagtcattagcatcttaaattgccatgtgtgtatatttctcaaaaccaaaaccagcgttggtatgttactattaattacattacagattttactagaatgttatcatttttccccttaagatattccataatctagagtaccatcttgtactactaataccttcctgctctcttctcctctatgacagtttttcattctttcctcatttttgatgattttgacaatcttaagagagtactagccaggtatcctctagaatatccaccactgcattctgtatttgactggtttttctcacgattagactggaattatggggttttgcagagaataccacagaggaaaagtgtctttcttgtcacttcctacacagaggaaaagtgtctttcttgtcacttcctgtgcagggtacatcataaccctgtgacttcactgggaatgttaacattcgtcatttggttaaggtagggtttgccctgattcaccattgcagttactgtttctccttttacctactgttactctttcaaatcaggttatactaagtgtagtccatcatcatgataagacgggggaattaagttccatatccttttggggttaggtatctacacagtatttggaatttttctataagaaagatttgtctccatttcttttatatatatactcagttatatttattttatacttgttacttatttttcatattggcttttgtgacctttgacaagcctttattctctgttagaggggaaagtagatggagagagggagggaagaatttttggagaggtatcaaataggagaaaacatggggtctagagccatgacaaggcggtggggggtgccttcaatattaaatgagagcctccacagttaattacagtatgaggagggatgggtccagattgcattacagccaaatttgtagtcattgagagtgagcagtaaacatttaatggtttttttttttcccctcagccacatcgaactacctggctgcttgaataagggtgttgtaatattacacacagatataaataataaacatgtagtaatagttcttaaatatttgtttagcaaaataaaaggtgctgggataagaaaaatgttaacattaacttggtaaatttgaaatacttcaatgcagattaaaaggtatctaaaaagattttgaggaaagctacacaatttttttcaaagaaaaatacctaaatttgaagctaaaaatgcataggacaactcctccccttaacctcaatttagtgcgagaaaagctcttataaaatacagttgtacttaagtgtctgtggggaattggttccaggatcacccacagataacaaaatttcaagggtgctcgcgttccttatgtaaaacagcatggtatttgcatgtaacctatgtatatcctctcatatactttaaatcatctctagagtaaccctaatacagtgccatacattacttcacgtagattcagcataacaccatgtggcaaattcaagtattgtctttgggactttatagggttttcttttcccctgaatatttttaatttgcagttgttgaatccatggatgctggatacagaactcatgaatatagagggcctgttcttcaggttagagataaagcctccaataaaataggaacagttttgcccgaataaagaggcaaactcttaatgagttgacttgcagtcttgaaggacaaatttatagatgaataaggcaagctaaggttattctctttgcaacactgaagatttgacgtttttagggaactaaaaataccatggctgtgggaaacctcggagaaggacagggaacttcgtaataatgctgttggaattaaactggaccacagtgaatactgactacagaatattgataatttgaatagctaagtgttgaacacagaacagtgggattttgcacctaccctaaaatgaaacatctgtgacctgttattggtgaggttatcacaaaggctaagtacctccaacctaaaagtaataggaactaaagtttactttaatgggtgtgatgcagtggtagagttgtgactgatatttggttactatctggttcttccactgacttcaatttagttaatggtaactgagtgactcgagacattctttatgcctaagttgttaacacctataaaatgaaaatgaccgtttctaccttgtgggaattattataaataatgtagcatatatgtatgcagcaaatattggcagtttttatcccttctccatgtttacagatatttctcatatatacacacacatgcacatatatatgtgtatatatgtttatatatacatatatttgtttatacatatatatgtttatatatacatatatttgtttatacatatatatgtttatatatacattatatatataatacatatatatgtatatatatatgcatgtgtgtgtatatattctcagatgcctatttcccacttactctttctagagcaccagatccatgtatctagctgcctcctgtgtatctccctttattttttttctttttgtcacgatgagtcttgcggtgttgcacaggctggtctcgaattcctggactcaagcagtcttcctgtcttggcctcccaaagtgctaggattataggtgtgagccactacgcctggcctgtatctcccttcacatgtcagacagccaattttactgtatttaaattcttcctaaatcctctattcaccaaacctgtatctcatgttgtatttcatattgataaacatcattatcagtacttgataatcctcttagatttcctttttgtgaacactaccactgctttgatttgtgggctaggatattgtagtttcttcctaaatggtcatttggcatttagtaggatttcagtaatatttgctaaatgaatttttttcaccaagcattgatcacttcatcactgatgctagaatgctcttaactaacgagcatttcatttcatgttatttctttgtttaaaccctttcagtgccttttcatggctttcagaattcaactacaatccttatgcatatagtaaaaagttcaggggttttttccaggactcacactacccccacctcccaattctaacctacttaggtgcacagaacctatacactagctacgttaactatgctgaactactaataggctttcatcttagtacaagtttcttatacctgggataccctacacataccccactaccatttcttttttcatttagctttcatgactcaattcagaacactaggatgccatccctgatgcctcttccctttcaatgggaattgggtgaaactcctaaaagtttctccttccccagtatccctctcccttagcatagtgtttgtcattatagcaagcactcaaatgtttgatgagggtcaatatctgttacctttctcaaagaggttttgatcagttgtattttttcctcattactgatagaataaatgttcttcgctggaaagcattctttgattgtgaaaggagtttttattctgaaactaaagctttgtaagaccattgtaggagaaacttttcttttttctttttaaatatttattttagagacaggtctcactatgttggccaggctggtcttaaactcctaaccttaagtgatcctcctccagcctcccaaagtgcggggattataggcatgaaccaccatgcccagcttttttctgtttcttaagtccaaggaggccatttcttcataagctgaaaaaactttgaagttatctgtccagccatccttcaggagagggtagaacatgtaaataaaccttattgtcctcaattttctacttaaagtatgccaacttatattttattacacacaactaagataggttgagaaagagcagcctcactggcatacattttgaaattagattatttgtatatcaccaaggacagaagcacaaaaaattactatgctggaagtaagacttggggtcaactattggctttcttcctaacatgctgtgtgatcctctgcaaaaatattaacctaagggacttcactatggattggtaaattgagttccctataaatgtatgatcctgaagtaagtgcattggggtgcatcattggcaaaataagcaacaaatcaaaaagtaatttacctaacttggaggagcagatgatagagttcaaaatgctttgttaggttaaaatactacgaacaggcatatcatgtactaggtagaaccgaattttataagtatagttaaaaagctttcaaacaagaaaatataaaatacattattgcttgataactagaccagtagatttttactgataaattgtttggacatttattttggcttatatacataacactaactgtaaatgagctatttctgtgaaaacacctaaaagtcaaaactaaaatggaagtgttcagtttggatgaagcaaatccagttaattatggtctatcctcgtattaactcttagtgacactgttacctctaatctagctgttgactgtgaacctgtcaaaaatgttgctttttcagcaattatttccatgtatcaaaattctgatcagggaaaacaagttatctgtattcttataatttgaataatgtattagagcctaagaattttaatgtggtatcagcaactgtgacacaagattgtgttgccctatatcacactcacaattatgtctcctgttccttattattgattccttagaatcacaaaaagggaaaggttaaggagaatgtagttaattctaccagaagaaactacctcagtattctcaggctgcacccatagtacctgtggcactaaaatcttaggatagaagagtgctaagaaggaagaaagaataataaaaataatgttttgtgtttttt

SEQ ID NO: 8697 - DNA, 31956 bp, Homo sapiens
tgtggaagctgaggaaaggccggtgacaggaagatgggtggcgtgacctgtggatgctgaggaagtgtcggtgacaggaagaggggtggtgtcacctgtggatgctgaggaagtgctggtgacaggaagagcggtggcctgacctgtggatgctgaggaagtgtcggtgacaggaagaggggtggtgtgacctgtggatgctgaggaagggctagtgacaggaagaggcgtggtgtcacctgtggatactgaggaaaggctggtgacaggaagaggggtggcgtgacctgtggatgctgaggaagtgtcggtgacaggaagaggggtggcgtgaccggtggatgctgaggaagggctggtgacatgaagagggttggcgtgacctgtggatgctgaggaagtgtcggtgacaggaagcggggtggcgtgaccggtggatgctgaggaagggctggtgacatgaagaggggtggcgtgacctgtggatattgaggaagtgtcggtgacaggaagaggggtggcgtgacctatggatgctgaggaagtgtcggtgacaggaagaagggtggcgtgacctgtggatgctgaggaagtgtcggtgacaggaagaggggtggcgtgacctgtggatgctgaggaagtgtcggtgtcaggaagaggggtggcgtgacctgtggatgctgaggaagtgtcggtgacaggaagagaggtggcgtgacctgtggatgctgaggaagtgtcggtgacaggaagaggggtggtgtcacctgttgatactgaggaaaggctggtgacaggaagaggggtggcctgacctgtggatgccgaggaagcgtcggtgacaggaagaggggtggtgtcacctgtggatactgaggaaaggctggtgacaggaagaggcgtggcgtgaccggtggatactgaggaagtgtcggtgacaggaagaggggtggcgtgaccggtggatgccgaggaagcgtcggtgacaggaagaggggtggtgtcacctgtggatactgaggaaaagctggtgacaggaagaggggtggcgtgacctgtggatactgaggaagtgtcggtgacaggaagagggatggcgtgacctgtggatgctgaggaagggctggtgagaggaagaggggtggcctgacctgtggatgctgaggaagtgtcggtgacaggaagaggggtggcgtgacctgtggatactgaggaagcgtcggtgacaggaagaggggtggtgtgacctgtggatgctgaggaagggctagtgacaggaagaggsgtggtgtcacctgtggatgctgaggaaaggctggtgacaggaagagaggtggcgtgacctgtggatactgaggaagcgtyggtgacatgaagaggggtggtgtcacctgtggatgctgagkwagtgtcggtgacaggaagaggggtggtgtcacctgtggatactgaggaagcgtcggtgacaagaagagaggtggcgtgacctgtggacactgaggaagcgtcggtgacaggaagagaggtggtgtgacctgaagatgctgaggaagggatggtgacaggaagagaggtggtgtcacctgtggatgctgaggaagcgtcggtgacaggaagaggggtggtgtcacctgtggatgctgaggaagggctggtgacaggaagagggatggcctgacctgtggatgccgaggaaacgtcggtgacaggaagacgggtggtgtcatctgtggaagctgaagaaaggccggtgacaggaagtggggtggcgtgagctgtggatactgaggaagtgtcggtgacaggaagagaggtggcgtgacctgtggatgctgaggaagtgtcggtgacaggaagaggggtggtgtgacctgtggatactgaggaagtgtcggtgacaggaagagaggtggcgtgacctgtggatgctgaggaagtgtcagtgacaggaagaggggtggtgtcacctgtggatgctgaggaaaggctggtgacaggaagaggggtgacgtgacctgtggatgctgaggaagtgtcagtgacaggaagaggggtgctgtcacctgtggatgctgaggaaaggctggtgacaggaagatgggtgacatgacctgtggattctgaggaagtgtcggtgacaggaagaggggtggtgtgacctgtggatactgaggaagggcggtgacaggaagagggtggcgtgacctgtggatactgaggaagcatcggtgacatgaagagggtggtgtgacctgtggatgccgaggaagcgtaggtgacaggaagaggggtggcgttgctgatgagggccgtggtgaaggttttaccagaccctgaaggtgacagagtgtgggtctgggtttgtggagatgtaagcccastggatgtgatcgatggaggtgtgggtgggactgttgagaaggtgtcggttgcctgggacgccaggctgatagtgtcagaccctctgctggttcttgtcctctgagtctgggccatccgggaaatggcggctgtctcctgaggagaggcactgggagaagttgggcttgactgtcctgtcggtctccctgcagtggaggcctcagagagggtgggatgaaaggtgccggggacgatcgaagacgccattcctgtgcttactgggatggcaccatgactggctgaggcggacagcaattcggttgttgactgggttgtgtgactgtccctggaggggtttgatgaaaaccttgtcgtctctcctgaggtggatattccttcgcttcctgaaggtgttgtgccactcgccccggatgaggaaggggtagctgtgcccgctgaggtggttcgtgaccctgaggaggccggttcgctggtctgtgtttgtccagaggcctctgtgctctcagcctggtgggtatgggtcatggctgctgctgtgtcaggtgaggtgctggcagaggctgatgtccattgtccttctgggccccctggtgttgacactacagagttggccagagtaagggcacctgttttggaaagtgacgtgcctcctgagggccccagggtggcatcatggctgctgggtgytgcctgcagtgctgtggtcggggcctgggttgtgtgaccatccccggtgggagctggggcaaaggttgttgctgcacttatggtgggtgcgtcctgaggaacaatttctgagggcgagtgcccactggctgtgaaggaagaacctggggtggtgactgtcttggtgtcagtcatggggkagacggacctcgtggtttgtgattcttgtgtggtctgcggggcttgagtgtgacccctttgggaaacagctggtgattcctgaggagaggtgcttgtggaatgtattgttgaatgatttgttgatggtgccgttgtaatttgttgkgatgtgtgtctatccagcataggtgaagaagatggggatgtggccgtttttatcatctgagtcacactgtagcttgggctgctgagaagagcctctccagtggtccccgtttcttgtgtccattgtgtctgggcgcctgcccctgttgtttttgggagagttgtgctgtgggaggagtatgtggtgggctctcctggttcccctattgctgagaccttagaggggacccttggaatagtgccagctgyccctgtagatggatttcctgtgacaagcctagtggcagcacctgttgatgttgagggcagttctgtttgtgaccaagttgtgtggcctttgctggagaatgaggaaggccatgttgttgtttcatgtagagtaaatatttcttgagacacacctggagagaatgagctcctctcatgaggcygtcctgtggtctctgcaccttcactctgctgggtgtggaaagctgtggatatttttggaggtaragaactgggggagagtgctgttgacagagtgtctgaccaccatatggttgaaactttggaagtgattgcagaaatggttccacttacagatagtgatgtctcctctgtgtttccaagagtagagtctctggagrttggcattctgaacacctttgatgttaccaggaatgtattgctgacactggaaggggatgagrtggttgtttcaccagaagggaatgtctcctgagaaactgttccacttgggttgaatccacttggtgaggataaaacagttgatgttgtaaccggtgtgagggtgttgagggtgttgatttgagatactctggtggtctccacgctctgagtctggtggttcttagaaaaagctgttgtgtcctgagkagaagtccttgagaaagttgctggtgattgtccttctggatcaamtgttactaaggctgctgaggtgactggcataagacttccagtaacaggtactgatgatgtctcccctgggtttccaagagtggagcctgtggaggttgtcactgttatcttctctgatgtcatcatggatgtgtttgtgacactacagagggatgaggtagctgtttcacctgaaggagatgtcttctgagaaacagtccctgtcacattgtgtacacttggagagaaagaaggagttgaagtggttctgtgtgttagggtgctggtttgagattccctggtggtctgcgtgctccgagtccagtggttctgagaagaagctgatgtgtcttggatagaggtcctccaggaagttkttcgtgattgtccttcctgtccagctgttattgagactgctgaggtcactggggtagaactttcagttcctgctgttgatgtctcttctgtgtttccaagagtggagtctgtggaggttgtcattgttatagtctttgatgtcatcatgagtgtgttggtgacactggagggaaatgatgtggtcatttcatctggaggagctgtctcctgcgtaacagtctccatcacattgtgtacacttggggaagaaaaaagagttgatgtcatcatctgcgtgagggtgtcggtttgagctttgctggtggtctccgtgctcttagtctggtggttctgagatgaagctgatatgtcctgattagaggtccttgaagaagctgcagttgattgtccctctagtgtcgctgttgttgagcctgttgaggtgactggggcagsagttttacttccagttattaatgtgtcctctgtggttcctggagtgaaccaaaataggcaagcagagagctaaatcatgaatgaactcctattcacaattgctacaaatagaataaaatacctaggaatacagctaacaaaggatgtgaaaactaccattcttcacagaatgagaacaaactactttaaaattcatatggaatcaaaaaagaacccaaatagccaagacaatcctaagcaaaaagaacaaagtgggaggctacctgacttcaaactatactacaaggctacagtaaccaaaacagcatggtactggtaccaaaactgacrtataaaccaatggaacagaatagataccttggaaataagaccacacatctacaaccatctgatctttgacaaacctgacaaaagcaggcaatggkgaaaggattctctattcaataaatggtgctgggaaaactggttagccatatgcagaaaactgaaactggaccccttccttacaccttatacaaaaattaactcaaggcaggttaaagacttacatgtaaaaccccaaaccatgaaaaccctagaagaaaacctaggcaataccattcaggacatagacataggcaaagattttatgatgaaatctccaaaagcacttgcaacaaaagctaaaattgacaaatgggatctaattaaactaaagagctctgcacagcaaaagaaactatcatcagagcaaacaggcaacctacaaaatgagaaaatttttgcaatctaaccatctgacagaggtctaatatccagaatttacaaggaacttaaatttacaagaaaaaaataaacaaccccatcaaaaagcaggcaaaggatatgaacagacacttatcaaaagaaggcatttatgccaccaacaaacatatgaaaaaaggctcatcatcatggatcattagagaaatgcaaatcaaaactacaaagggatatcatctcacaccactcagaatggcaattattaaaaagtcaagaaacagcagatgctggcaaggctgtggtgaaataggaacgcttttacactgttggtgggagtgtaaatcagttcaaccattgtggaagacagtgtggcgattcctcaaggatctagaaccagaaataccatttgacccagcaatcccattactgggtatatgcccaaaggaatakaaatcattctgttataaagatacatgcacacgtatgtttactgcagcactatttacaatagtaaagacatgaaaccaacccaaatgtccatcagtgatagactggataaagaaaatgtggtacatatgcagcacggaatactatgcagccatgaaaaaggaatgggatcacgtcctttgcaggtacatggatgaagctgaaagccatcatcctcaacaaactaacaggggaacagaaaaccaaacactgcatgttttcactcataagttggagttgaacaatgagaacacatggacacagagaggggaacaacacacactggcgcctgtcagggaygggacaaggggaggaagagcgtcaggataaatagctaatacatgcaggtgatgggttgataggtgcagtaaaccaccatggcacatatatacctgtgtaacaaacctgcacgttctgcacatgtatcctgaaacttaaagtaaaaaatgaaaagaaataaaaagaaaaaatgaaaaattaatatatcacaactgtacatatttgggggataaaaaaataataagagatggggccgggcatggtagccccacctgcaatcccagcactttgggaggctgagatgggtggatcacttgaggtcaggagtgcgagaccagcctgggcaatatggcaaaaccccgtctctactagaaaaaaaaatacagaaatagctgggcgtggtggtgggtgcctgtaatcccagttactcaaaaggctgaggcaggagaattgcttgaacccaggaggtggaggttgcagtgagcagacatcatgccacttcactgcagcctgggcgacagagcaagattctgtctcaaaaaaaaaataaataaataaaataaaaaaggagagagagatgggggtgcaggattcccacagaggaaggcccctgataagcactgcttcaaatcgcctagaaaaagcacagttgcaggaatatagccaatggtcttctccagctcccgcctgtcttccttgtgaggaggaaggtgaggttagactagaatggtgaattaactgtgttaaactccatgggaagargcaaacagtacccctgctataagccgggttaactctctcaacttgaattatagcattatctttcttaaaaataaattaaatttctacttttctttttcgttgttaacatctgtgccaatctggtaaaaaacccaaggggtaaatgcatatactcttgccctggtcacagactaccaagaagctaatattattgaccataaccactttttwaaaaaaaattatttcccaggcagaggccaggcatggtggctcatgtctgtaatcccagcattttgggaggccaaggtgggaggatcactcgaggccaggagtttgagaccagcctgggcaagatagcgagaccctgtgtcttaaaaaataaaaataataataataataataaaaatagatattwaataaagaaaaatatttcccaggcagaatgtttaaatattggctttttttgtttaaaatatttcacagcacctgcactagccacataccatcttcgtgaatattaccttagcctctgagtctctgaaccaagaagaaaccaagaaaacttgcctttttttttctcttagaaactgactcttttgggttttcattagttccctagctgttctcaaacttctttcttttttctttttaaacatatatatatagagagagagagagagagaagaaagagagagagagagaaagaaagagagagagagaaagagagacagggtcttctgtcacccaggctgaagttcagcggtgtaattggccttctgagtagctgggactacaggcacacacaaccatgcctgggtaatttttttatttctgtagaggtggaatcttgctatgttgcctaggctggtgtcgaactcccggcctcaagcgatcctcctgcttcagactctcaaagtactgggattaaaggtgtgagccaccgctcccacyctttttttcaacctcagtgctcctagatagttggcaagatgatactcagagagacaaagtctcagggaagaattcagcttcaagtccactttctggaattgactgtaattcgccaccttctcttcttcagacagtaacttagactctcaagtgagtgataatggttatgaaccagctctaattgttaaaaaagtgactcacgtgcaagcttctgcacttcattaatagtaactgcttactggtgacacacttgtaaaccgacgtggacaaaggcacgggctgaaccgcagagccctctgggaggtccctgggcccctggcttaatccaaaatgactccacttcaactttaaacggaaacttcctttagttggaattaggttgagatttgttgataggactctaaactcgatgcctgctttctcctagagaaaatttgcaaaacttggtttctccaaataaggtttaaatttaaaaacattctctatgcagttatttttaaccttatttcatttccctgataacataattaagagcatttgtctatcatcaggctttgagtagacaggagctatctaggggccaaactttctgaatgtgtaaattcttggcaattaacatcttttcagagcctgcatcacctctgctaaaatcagtgtcagcagcagaagtttcatgacagcaccgtccttttttttaaagtaaagatttttgtagttctttataaaagtggcacagctccatttcagcaatatggaagaagagataagcctctaatagcaaaaccagccratgccagataaatacaggttataaatgtaataaatgttttctaatgcagaggtgagatgagaagaaagaaagggaaacactcaggagtgaagaagttaacaactaagatggtgagtcaatgcccttggaaatgtgctgactgaaaggctgaaaaaggaaaggaagcaagaccctcggtcacgacactgaactgagtttccctgcaaaaagctggaaccgccagcaaaaaaggtrgactagaaagaccaggaagaaaaaagaaaaaggaagcagaatgaaggatatagtaacagaccagaactcactatagaaacaattaaaaatggaataaatgaagccaaagattagttctttgaaaataaaacaaayacctggcaagagaaagaaagtgggggggggtgtgggaggagggagagagagagacagaaaagacacagatatcaagattattagaaacaaaaaagggtacataacttcagaaaaaaaatttaagagacagtgctctgatgaatttataccaaaaagtatgaaaacttagataaattggatatactgtccttaaaaatataatttatcaaaaatgaattaagaaaaaaacctggctaaaaactattttattttatttatttaattttatttatttatttttttgaaacagagtcttgctttgttgcccaggctggagtgcaatggcatgatctcagctcactgcaacctctgcctcccaggttcaagattctcctgcttcagcctcccaagtagctgggattacaggcgcatgccaccacgcccggctaatttttgtatttttagtagagactgggtttcaccatgtcgtcctggctggtctcaaactcctgacctcaggtgatctacccacctcggcatcccaaagtgctgggattacaggcatgagccacctcgcccggccactataaactattttaaattgaatcagcagtttaaaaaatataatctaggccgggtgcggtggctcacgcctgtaatcctaacacgttgggagggtgaggcaggcggatcatgaggtcaggagattgagaccatcctggctaacacggtgaaaaaaaaattagctgggcatggtggcaggcgcctgtagtcccagctactctggaggctgaggcaggagaacggcgtgaacctgggaggcagaggttgcagtgagcggagatcatgccattgcactccagcctgggtgacaaggtgagactccgtctcaaaaaaaaatatgtatatataatctatccaccccacaaaaaaatgcaggctaagatgagtttacaggcaaatcagacattcaaggaacaggtaatttcaattctatacaaacatattcagagtttggaacaggaggaaatgatctactaataattttataaggttggaaaccaaagataggataagaaagacaaactatagattaataagtcccagtaataatacatggaagcatcgtaaataaaatattagcaagccaaagtgcatcatggccgggcgcggcggctcacgcctgtaaccccaacactttggcaggccgaggcaggcggatcacttgaggccgggagttccagaccagcctggccaacctagagaaaccccgtctctggtaaaaatacaaaaaatttgtatttttttggattacaggtgtgtgctgggcttggtggcacacacctgtaatcccagctactcaggaggctgaggcacgagaattgcttgaacccaggaggcagagattgcagtgagccgagattgtgccactgcactccagcctggtgacagagcaggactctatcttaaataaataaataaataaataaatattttaaaagtacatcatgatcaagctgagtttaaatcagaaatgcaagataaagacaatgctttcttaatgtaaatcaccatataaacagaatggaggggagacacaatcaccacagcagatacaggaaagttatttgataaaagtcaacacttactcctgttaaaactcctagcaaactaaaaagagacgttaactcttttaacctgataaacaatgtcaattataaccccgtgtaaacattatacttaaaacaatagaaacgtttctgtaaaatcaggaataaaaacaagatgccaacaatcactgcttctaatcaacattaggttgaaggttttagctggtgaaataagacgagaaaattaaacaaaaagtatgagagtacagaaatgtgattttgggtatggaagggatgaaacaagcctatggttatttgcagataacataattgtttacatagaaacttcccraacatatacattattagcaaagttctatatccataatcaaaattttaaaaataattgcattccagctgggtgtggtgattcatgcctgaatcccagtgctttgagaggctgaggcaggaggaacacttgaggccaggagttcaagaccagcctgggtaacatagcaagatcctgtctctacagaaataaaaaataaaaaaataaaaaattagctgggcatagtagcacacacatatagttccagctactcagaagttgaggggggaggatcacttgagcccaagagttcgaggctgcagtgagctatgatcaccccactgtactccagcctgcatgacagagggagactctgtctcaaaaagagatttaaaaacaaaataaaactgcattcctatatatcagtgaaagagaaaatatttttaagactatagtgtttatgatggtgaccaaaaaaagtacataaaaataaatctaacaaaagatgtgcttaatctttatggacaaaattgtacaactgcattgaaatatgccaaagaaaacacacatactggttacgtgcatttgggaacatttatagttgaaagatcaaaacccataatcttgctaccagacaatgcttccttccaggatgtttttatgctttaaaaaatatatagtttaggccaggmgtggtggctcacacctgtaatcccagcgctttgtgaggctgaggtgggcggatcatgaggtcaggagatcgagaccatcctggctaacagggygaacccccgtctctactaaaaatacaaaaaaattagccgggcgtggtggcgggcgcctgtagtcccagctactcgggaggctgaggcaggagaatggcgtgaacccggggaggcggagcttgcagtgagccgagattgcaccactgcactcctgcctgggtgacagagtgagactccgtctcaaaaaaaaaattaaaaattaaaaaatatatatgtatagtttaacttattcagtatacataattttgtatcctgcctttttagccatacctgatatgagcatttcttcaagatactagcttcgtaaacatagcctgagaagacgcacatcttttatgtcttggatggcagttccttgcttcccccttttggagtcctacaagagctggctcagggggactgggagagctcagctccatagtaaaatctagggtgctgtataaaaactccccctgctgagctctggtggcctccttcctaacaaagccactcccccaactggaagcgttgttacccttcccattttctgttaaacaggagcaggtctctctcctgtaccacatcctgctgtgtgtccaccatacccacctctctgtgcaatgagagctcgggggtcatgtggactccactgctccctgctcgcaatttctccttaatacatcttactttatgcccgttctgtgtgttgctagtatgtatgtgtgacactgtgtgtgtgtgtgtgtgtgtgtgtgtgtgtgtgtgtgtgtgwgagacactgtgtgtgtgtgtccctgcccttatagaacattggacatagcctttaaacatttttttttccagatggagtttcacttcttgttgcccaggctggagtgcaacggcacgatttcggcccactgcaacctccacctccgtgattctcctgcttcagcctcccaagtagctgggattacaggcatgtgccaccatgccaggctaattttttgtatttttagtggagactgggtttcaccatgttggccaggctggtctcaaactcttgacctcaggtgatccactcacctcagcctcccaaagtgctgggattacaggcgtgagccaccgcgcccggcctaaacactaaataataagccatcatagagaaagctcatattgttaacttactgttggacaattaggatatttccaatgtattgcttattttaaataaagccctgatgactatcttcgtgtctaatgttttgtttacattatttcagctcatctccttaacataaatttctatcagtggaattgctggtttatgcygttataaaatttttcatgttattaatacagactgccaaatttctttgcagaaagcttatgccaatttacagacctgttggcagtgtgcaagagtgtgcctgtttccccatatccctagcctgtgaacaaaggggcatgatccaggacaggccccatccctcacctgctgctctttgcttcacagcatcgactgaaaatcggccaggtgcggtgcctcacacctgtaatcccagcactttgggaggtcgaagcgggtggatcatttgaggtcaggagttcaagaccagcctggccaacatgatgaaaccccatctctactaaaaatacaaaaattacccaggcatggtggcrtgcacctgtaatcccagctactcaggaggctgaggcaggagaatctctcaaacctgggaggtggaggttgcagtgagccgagatcgcgccactgcactccagcctgggcgacagagcgggactccatctcaaaaaaaaaaaaaattcttgctaaacagggctgtgtcctggtagtcctccttttaaatctttatttagagaacttgctcatcttgagccaagttgattagagtttcctgctgccgcaaataggagggcaagtgagtcactgcatgtggaggacatagttttattgtctaggggagaaggcgctgtcaaaatctctcaatctgttgggcttgtgaggaggaagagattagcattcgttacgacaaaactacagttattgcatttgtctttcaccatcatttaaacaatacctctgaagccactcctgcaatagattgattattyagctgtttaggaaaacaatttgcagataactcaatctactaagcttgagtaggttatttgtaggtaagaaatcctgtgttcaagtatgacctatctttacaaagaagaaaaagaaagaaatcctagtggatggagagactatggagaatgatttttggtaagaaaatggttctcagctgggcatggtagctcatgcctaaaatcccagcacggacaggcagaggcgggaggattccttgaggccaggagtttgagaccagcctgggcaatagctcaagrccccttctctgaaaaaaaaaaaaaaaaaaaaagtggttctcaaaaggcagagggtgcatcagcattttaacacatgtccagagtgattctgatgcaggtggtccgtggaccccacgttcagaaacacttcccttaaaataaaatgatagtatccactcttaacaatgtttgtaagccaaaaccatctcgctgaagttgtcaggcagagaaatttgaagccttgatcaagttttattctaaaaaatactcatagccttgttcttgctgctcaagtgttggccagaatgaactgaccttggctctcaccaggatgcaagtcaggcccttcagrttccgtsagattgtcagacaactgaaacttgttctcactctggccaaacgcataaacttggggagcagagagctgggagatttgcgcctaaagagttgatattggagagaaacaggtctctcctctctcttctctccccgtgacmctccattttctacttcactgaaagaaccaaagccgtgcccttcatctccttcaatgcccagagccttctccgcaccctccccggggccccggggctccctcctgcccggatggctcactgctctgcctctgtgtctccgacgttctttctgcctttctccttctctcctgcctgtgagcatgttcaggtgtctgttggcctaaaacaagtctgtcatccgtctgtgtcctcctcgtccctccagcagcatgaaagccgggcttcccctgccgcctcttctttaccacgcactgctcgctctgcccccacctcactcacttcgctcaagccgttttcctcagagctaccagaatctccttcccaacagcaaaaacgattttctccagtcctcacgcgtctcatcagttcggccccatccattcattcattcatgaatctgacagatgtgtattgcgccccccsctccacgtgctctccctggccggcggccccgtgccaccacccagcctcaccctcattgaagctgacgggtcctgctccaccgtccacgctcccgggccctccactccactccccttgccacctctctcccccgctccacgcccagatgacatgtctccagccctttccctctcctgctgcccctccctctctggccaccctgcgtctactctcacgccttacaaatctgtacttctccctgacttcccacccatatgctggcctcaccctcccagggatttcctgcctagctcatgcaatgcaacaggtccaggtcaatctttccttgcaagctttcttccttccttctgttcatgctaacaacagtcccccagacatccagcccagaaagctgtgggtcctctggatttctttctcttccttgtccccygtgtcctagtcagtactcgttgatcttcctcccaagtgttcaccccatcgcgtcctcttgtttgctttgccacatcctccccgtcgctttgactactgcggcagcctcctcactgcccctgctgactcgggttccgcacccctgctctcagcctccaccrcacccctgctctcagcctccaccrcacccctgtgggttgatcctcagctctgagggccaggagggagggttgctgctgctgtctccttagctcgaattgctttggaaaatggcctgccctgcctgccctggaaggtgtctggtaggtcctggggtcacagactggtgactggcattggtcctgggtgtctgcgtaggtcccgggggcgtgggtctagtggtcagagactggtgactggcattgccattgtgacacggatgtcagaaaccagaatcctcagagggaggccactgggcaagaatgaccttcgtctggttgtgactgaggaaagatacttccagcgcgtctgtgtgcgtggcagggtggcttctgtaataagaaatggccacgccaagggatttctcgtttctgcgggagacattgttcagttttgtagccggcagcttaaattcaaaatgcattttaaacatgttttcccctttctcttgggtttccaaatacaaccttgaggcarctgcaaaggccgttttcctcagcctaaaaatagacttcacgcccctcccttttctcacgatctgtacacactccctccctcttctcaccgtctgtacacactccctcccttttcttgtcatctgtatacactccctcccttttcttactgtctgtatatactcccttccatttctctgcgtgcgaggatcgaattatatgtcttcctaaaagttgcaggggctaaaaccttgagagagacaaaccacatctgaaaatccagctgcaaaatcccagaaattacttcaagacagctcttgttaaaataatgtcagccagaggtccggacggactgggacccagaagagccaccagaacaagacatgcggacacaggactcagcccgattcttgcgtgccttccttatcaaggctttcccctctgaaaattaaagcagctactttaagtagaaatctggctgcttcccctttactagttttggttaataaattcacgttcttcctaccagaccttatgaattaaactatccgtttaatataatataaactctctgcaagcagcgagagcctccgcatctgcgctgggtcgagtgactgagggtcagctgacttgtgatgaacacaccagggaggtggggcttctttttacttctctcgtaggcacgttatgactctatgaataatacaaatgttcacagctcatgttcatgtggtgctttatagcttatcttgttaatagcggccccatttcacaggcggggaaatcgagattcagcggccccatttcacaggcagggaaattgagatttgaagagaccgagtgatattatatgccttggaagtagcagggccgggggctcggggtaagagccattgctcggaagctgcgagctkytcagctctgggactgccaccgagtggatggagagctgaggcaaagatggagaaatggtcactgacctgccccaagttcttggactgccacatgcagagggctctgagcctgaggccgagccaggcacattctcggggtggacgctgtgacactggggtgtttttgcaatgttcctggtgtctcttttctgggatgatgttagagtgagtgtgaaggctgttgacaccttaaggtgacaagatcactgtgagaagacacacgtgtgtcattgagtaaaacggatagtttttaagacattctctcagaggargagtctccatccagggacgaggagggcactggcgttggcactgaggtagagacgttccccacatctgagtccttgaaggctctgtcaagcctctgccatcacgtcagccagagatctcccatcaaggtagttcttttctctccttgaaccacgtcaggtgggagacggcccacagctgcctcacgtctgttagggctccaggatgtgaaggccgagtggcagtaggcatcgttttccccagatggcccctctggtgactccacaggtgtgccgaggtgacaggtgtgctgttggctcgggagaaggagtggcagcagtatgagtgacgctggcagaagacagattccaagaagggtgaagccactccctgaagacacacaaagcctgcggctttctaagtgctgtgggttgaggcttattcctagcatctggtctgtttgtcttgggtttttcctggaactggaggtgaggaacccgtaagccgtatcgccacagtgtttcactttcctggaggggaattacttcctgacgggtggggccccttgccaggctgcctcgggcagggcagtgtaagcccaagggaagtgcccaacggtaaggatggccttgaggagaacattcagccccacacaggcagcaggcggcccggaaggcgcgcagacgctgaaccgctggccccaccgcctttggcagggagctaatgctatttgtgtatcagcccagaatcaactgtgaccagggttgtgtccactgggtayttccctagaattcaagatgaggaaagacactaactcaagatacccttggaataacwgayctcttgtgatctccagmgcctgaaacgagacttggcatacagcagtgacttcrtacacatctgtggaatacatcccaggccctgtggcctttgttgccttcagccgaggctggagagagggtgacgttgcctgtttctttatctttatcttttttttttttttgagatggagtctcgctctgtcgcccaggcaggagtgcagtggtgcgatctcagctcactgtaacctccacctcccaggttcaagtcccttcacagtggactccaaggcgagaactttacccgttctttccaacgatccccgccgaagtcacaccccaacccatggatcccaccaccggtcatttgacctcatttctgtcagcatctggtgtggcagcacccagccactctggtgatcgccacagaagctccagcaccaaaccaagaagcaccaaaatccggctgtgagcacagcacgccggccagctcaactctcttttccccaacgcctccttctcggaggtgccatctccagtctccaccatcttggtgttgccacccatctctcctggctcccactggggcaggcacatcctcctagcctagcgctgtcctcaggagcctggctgcctctccacagtggttagcctcgggctgtcctggtgtggtggtgtgtgcctgtgatcccagttggaatcaagtgcttctcctgcctcagcctcctgagtagctgggattacaggtgcccaccaccatctcctgctaatttttgtatttttagtagagacggggttttgccatgttggccagtctggtctcaaactcctgacctcaagtgatctgcccgcttcagcttcccagagtgctgggatgacagccatgagtcactgtgcctggccttgtctgtcattttaattactcaaaatccataatctgggccgggcgcagtggctcacactggtaatcccagcactttgggaggccaaggtaagcagatcacttgaggtcaggagttcgagactagcctgaccaacatggcaaaaccccatttctactaaaaatacaaaaatcagcagagcatggtggcatgtgcctgtgatcccagctactcggcacgagtatcccttgaaccctggaggcagaggttgcagtgagccgagataacgccacagcacttcagcctgggtgacacagtgagactctgtctcaaaaatataaataaataaaataacataaaattcataatctattccacagcttgcaaagccctgcgcgatctaacacctgccttctctttcaagtcctccaaggggccaagctctttcctgcctctccatgagctccgcctctgcctgctcaggcctggcaccttctccacctggctgtcctcagcctcaggcctcagctccccgcagaacggttcctcacagggcccttcctgacttgtcagtcagatgcacctcccctactctctggccattcgaaatgcagctctcagcacaccctgtacttttccacactgcatttaccacatgtgcagttgagaacatttcygtaattatttgatgtctgtctgcaccaagattttagtgccaagagactgggccacgtctgtttcactcttcactgtgtgcatccagtgctgtgtcctagaacaatgtcaggaacttaaggcaggcgtttcctaaatggtggtttaattaacaaatgaatgaatgaatggctgtctcagcagggtgtgtgaatgcttctgttcttccctccgtcggtgggctgggctggtttggagattgccgaaaggctgtgtgctgcagtgagtcaggagacctgggttctagtcccagctgcctcacttatgggttctatgatcttaaacaagtcacttaacttagagagctttgaaaagcaggaactgtgacgcattcatcttcctgtccagagcagctggcatgagtagaaattctgcaagtgaatgaacaactccaaagtctaggctgtttcttattccaaattcccccaaaatccactggccactggacttttggaacctaaactgcaacctgggcggggcggcatctctacagagagtcgatgtctgtcctctgtggtccctaaacacatacacggggagtggagctgcgggcaacccaggccagtgcccttyctccaagcagggccgccattgcaaggcctcacgtgcaacacaaatgcccagttcctgagacttcttcagartctccaggaaaagggtgaaaaggcatttaaacctctatgaagtagggccaggcacagtagctcacgcctataatcccagcactttgggagccgaggcragcggatcacctgaggtcaggagttcgagaccagcctggccaacatggtgaaaccccatctctactaaaaatacaaacattagccgctgtggtgttgggcgtctataatcccagctactcgggaggctgaggcaggagaatctcttgaacccgggaggcagaggctgcactgagctgagaccacgccactgcactgcagcctgggggacagagagaaactctgtctcaaaaaacaaacaaacaaacccaaaaaaccaacaacaacagcaacaataaaaaaaccgtctatgaagaaatcgtckatgaggtgccaacagactcagttattttgactcaatttctcagaacatgctggggcgggaactcagcctagcagtaagaaagacgtatatttaaggtaaaaggctgaaactagggggagagagagcctataaggtctctgtcctggccttcagagaagtggctctgtgagctacacgatgtgcatattttaagcacttaacagcaccgtgaaatcagagaaaagacacagagtagcaaaaccacccgttgagcgtacaaaaggccaaccacttcttgtcctctcattgcctcttgtccttagcaatgaagacacaaatcacttgcgtgtcaagcactgccaggccagcctctgccaggccagcctctgcctccacggctgagcccagaaaccaagggcgtggcgggactcacaggcagggagcggtgaggcagagctgtccgctggagcgagcccctgctctagggccatggccctcggggtccgttcatgcagcaagccacattctgaatacaccaagccagcccttgcaaacccacaggaagcacggggtggctttttagaggcacgaggatccttagatgaagggatatgaccctgggccgacacaagtgccattccgggttcaatcaccctccttcccccgtcttcccaggcctctttctcaaacacgtctttatggcttttcttttttttttagacagagtcttgctctgtcacccaagctagagtgctgccatttcggctccctgcaacctctgcctcccaggttcaagccattctcctacctcagcctcccgagtagctggaattacaggcgctcgccaccacgcccggcaaaattttttatttttagtggagacagggttggccaagctggtcttgaactcctgacctcaggtgatccacccrcctgggcctccaaaagtgctgggattacagcgtgagccaccgcgcccggccctttatgccttttctactttacaccagatgctgtctcgtttcatcctcatgacaaccctacrtagtagccccttccccctgggctcagttygccgatgaagagcctaagactccagagccaaaaggcgttgcctgtgttccctgggctgccaagggcgtcgctgatgctggacctctgagtttcagcccctgctcttccctgtgcaccttgctggtcgttggccaaaatttggctgatkttcctggcaggacctcttgtccagggatcctttccttttgagtgtcctggagcacagtggggtttcccagaggggcagaggggtctgtggagagttttggtgtcctcggtggcaagttgaggtggcctgtcccagactgacagatagaccgggggttctccgaggaggggcccataaagacccttccccgtggagtgcgctgtggccggcgtcccctcccctgcctgccctgcacttgctccagcctgtcacctccctggggtcactgatagtgctggagaccaaggcctatttcgacccagttgcctttccctgtggcatggaaccaggacggccaggcttccttctgagtcattcctgcctggggcgaccagtagacaccaaatttccatctgtccttgtctagcccacctctgtctgctgtgycttatcctttaacccttgagagccagggctgttccttaaggaaaccctcattgcggcagctcctttgtggaaaccctgtgtttttcctctggcctgggcttcagtgtgacccagcctgggtgagggtcctgccggcaagtgtgcaaacagaccctagactcaagtataggcaggtcatctgtaaaccccttcagggagccaaaaggaacggggctggctggctgccagtcctccagcagctgccctgtgggggtgggggctgcccacccgcccttggtgactgcttttcctgccaaggccctggtcatgcccggtcagatgtgtgggtgccatctcccagccacgaccatctcctctcctggcccagctccacttggtccccttagcgacgcaaaggactcagcgctccacgacatgcctagcttcttcgggtcgtcayggagacgcccttgcacaccaacagtccttcactccttctccgggtcacgcccccgtgcttttccacgcccaccccaggtcttgcccctctgcgctcctctccacagaccccacttcctggctccacatggagctgagtgtccagctggtacccagcacatttgggctcagctttaaatcacagatttggaaactcaagaacttgggcgtcaggaggtccaaccgttcaccactgctttttacacaggggaccggggccctggggagacacggggcagggcctggtcacaggggccagaacagttcacggcaaagacttggcmctggggctcctaaatccaagctgcctccccggcgccccaagccccagcctcgctctgggagtcatgattcccgtggagactccttcaaccacatctgcagggcagggccgtgtggcggctccttccggcctccacgtcctcacggtgggatgagcactggagcggggttgtgtggccagggtggggtgggggtgctggagggtggggaggtgtagggaggtggtggcagtttcctttgccctcagcctagtcctgaaacatcccgaggtggaagggtccgcttcaccagcatggcttctcttgcagcctttaaacggcaytcgccttctgactcactcccaggaagctcctcaaatatgcgcccaagaaatattttccctcggcgactgttcttagcctgctgagaggcagggcaggagctgagactctaaccccagcttgaactctggaccccagactctcccccaaagactcagacacccagaaacacagaataaaacttggtcctgaagccagagggacagcctggaaagtgtggggaagaggacgggggcccccgagggaacatctcccacaggcctggcatccctcccctcccrgctctgtacacggaggagcccaaggccaatgccggggctacgagccccaggcaaggccgtgacccaaatggaggcttttaaacccgagctcagaggtaagaagcccacggccagcacctcccggccctctgcgccctggccgcctcctccgcaccaccctcccggccggcctgcccctctcctccttgtcgcttcccttgcttgctgctgtctcccgatcttctcctctctccattcccagggtcctcagtttgtctgcgtctcacctgtctcgtcctctcaccctgcagctttacatgagttttcttccgtctccatcacccagctttcctggcatcccctctacccccagctctgtacacaagggtgtacatctttctccttgactctgttcctcttgctctggctctgcctgtctttctctctgcgagtaagcctgggctctcaccatggatccttccagacatcgccgggctgctctctggccctctgttctcttttctctctctttcgagcattctccctctgtctttcccctcagatcttgtcccgtatctgccagttcatgcctcctcttccccacttttctcctcttcttattttttattttattttatatttatttatttatttatttatttatttatttatttatttattttgagacagagtctcgctctctctcccaggctggagtgcagtggcgcgatcttggctcactgcaacctccacctcccaggttcaagtgattctcctgcctcagactcctgagtagctggaattacaggtggggcccaccacgaccggctaatttttgtatatttagtagagacggggtttcaccatgtcggccaggctggtctcgaactcctgacctcaggtgatctcctgccttggcctccgaaagtgctgggattacaggcatgagccaccgcgcacggcctccactcttctttctctctccctcttctcttcctcttctttccctctctgggtctctctccaccttccccccatgttgtcccattcatctctttctcctttccctctccctctttttctctcccttctcttcctcttcgctgtctccctttcccctattctctctctctctctctctgtctccccggacctctttctctgacagctcccacctcccccaagtgctccccgcagccagcctcatctgctgtctccatcacttacctgggaccacatgcggaaggaggcagagacacaggcagctcagggacacccaggggaccctcctccagcgtgcccccttcatggctgcggcaaaagtccccctggctccctggggaagctccacggcccagcagctgcagtgtgaggagcagacgtgagcccgtcccctcaggcggctggcccgaaccaagtgcgtttctccgaaggggccagggaacctgggaagaggacaaaagagggcggggccccacgctaatcacccttttctctcctcagccccaccccactaccccaccaggaaagaaaacaccgatacacccgttgctctgcttctcatcagcctgagctgagtggcgggagggatgggaggagacatgggggaatgggaacaggtcacactggaaatgggtgggccaccctcctagccgggttcctgggtcctctcctccctccccaggggctgcccctgtcccaccagagctttgggctgctgggaagaatggggaagaaagggccccagagggagcgaccttggggctgtatgaatgggggaaagagagtgagacttaagcagaccccaaggaattgggaagcggggaaccatgtgggtgaggggcaggaacagaaatgcactgtatgccgtcttttggaaaggggtggtgtgcttggaatatctgctcagtgcaggcgcgtggcagaccccagacgcgtggcagaccccagacgcgtggcagaccccagacgcgtggcagaacctcagtgcagacgcatggcagaccccagacgcgtggcagaccccagacgcgtggcagaacctcagtgcagatgcgtggcagaccccagacgcacggcagatcccagacacatggcagaccccagacccatggcagactccagacgcgtggcagaccccagacgcgtggcagactccagacgcatggcagaacctcagtgcagactcgtggcagaacctcagtgcagacgcatggcagaccccagatgcgtggcagaccctcaccagatggtggacttcttctttccagggcagggagctggagccagggtgcagggagccagggacagtctgggagactggcctgagggagctggcatgggcagtgggttgaaggcagaacctcggtaggaggaagcgactgtaacctgtgaggaggtggagctgctcctggagacctgggggctctgctcaccccagttccacctcttggaactcacaggcacaagcgaggagggaaagggaccccaagtagggttgtaaagacgaagagggcagttggtgtagctctctgcaaaggaaaacggggatacctccgctcccctctttgccacagtgtgaatctctgcttctgattcctcaagacttgattcccgaatgtggggtgtctgtggggtgactcgtcccagagcagggaccttcgatgctcagacactgtggggcccaggacaaggactcagggtttctgcattcccaagcagagccagccttgtccagcaaggagtaggcaaccgacgctgtggcgctgtctccgagggtcacggaggccctgtgaccacttgcttctagaagctgaaagtctgttcatggccccaggccaaagcctgggccacgccataataatgcggataccgtggggaagtggcgtggtcccccaacagtccctccagctctgggtggacgagctgaccctgttctttcctggaggtaagaaaatcataaaggtaaagagtcatgtggagcatcctgtgggcgcctggacggggcagcaggagggacctactgcagggaattcgcagacaccaaggcccagcttggccttcgtgatcattttgcacttttttttttttttgagatggagtcttgctctgtcgcccaggctggagtgcagtggcaccatctcagctcactgcaagctccgcctcccgggttcacgccattcccctgcctcagcctccctagtagctgggactacaggcacctgccaccacgcccggctaattttttttgtatttttagtagggacgaggtttcaccatgttggccaggttggtcttgaacccctgaactcagatgatccgcccgccttggcctcccaaagtgctgggattacaggcgtgagccactgcacccggcccgtggtcatttttctgtcagctcttgctcgtgggtccccccattacctttccacaggttttgtttggtgacgctttcaggacaacagttttccatctctagaggagaaaggagcatccaggtgagaccaaactaagcgctggacatcttgttgaccgaacacaggtagctgacctctttcccatgccaggaaggccagaggcacacagcgctctccggaagctgctgtgacggccgagactccaggagggcgttacaaacccgggcttgatcccagctctgccaccgcgtcaccacaaagtcacagcctcttcgagctgttttcctcgttcacctgtaaaatggggataacacctatctgaaaggttgtagggtgggagtgagcctgtagatgctgaggggctgcgggagtattaggacacctgttgtgaggacacctgttgttacgacacctgttgtgaggacacctgttgtggaggacacctgtggaggaacgtggctcctccttccatccgggcatcatccctggagggagacacaaacgagggccagccaggatacaggaggagtccggaagtgaatttccaggcccaggtctttcctgcgtcccctttgagtcttataggatcctgattaggagcgtgagatcctggagaactgggcgtgcgcactcctgttcacctcttccctgcccacgcccgtttcccttctgctttccagctcccctcaatatgcccattttccagagttaggatgcgtctgggtctctgtgataaatggctctgtcttcatctgggttgggtcacgggacacccatttgtccttccttctctcctcccaaggcatccgatggggacagaatggggtgaatgagaggggacaaaatgagtggcttctctagttccttgtggccgaaaaacctcctaggcccgcatactgctgggtctgcataggggcaggagtctgaagtcaggtgtaagttaatattccacgggaggcaggaagagcttagtgtggatgtggggtgtaagtaaattggagcaaggataagatcatgagattctcccagacttggcttgaagagacagctgggtttgaggcagcaaagccaggatctccaagagagattccccttctaagctacccaagtaggagtccctagttttttgggtcccctaaaattgcttacctttatatcatttatgcctcgtgctgtgaataaagttcaatcttgtcagacttaggacaactaggctgagctcgagcaggaagctggatgtttattaagtctgatttacctactcagtctggactaaaaaggtgtgtggattccctagtcagtgacccagcatgaagccggtcactagagtgccaggccctgagcctgtccccatggccctgtgaagtacaaagcgctgccctacctctcaagtgagcacgctgaggctccaggagcttcatcatccccgagtcaccggccaggtcgggccatctagggaaactggagagtgttaactccgcagttacagccttctgggccacacactgtcccaaagctggaatttgagctctgttctgcctggctccaaagcaaaagaagggcaatcacctgggctgaccgcccacgacatccttcgctccgggtcctttcccggtggcaggtggagacggccttttggaggggcctcgctgtccagctgcaaggatagtggttagtggacagctcccagctgctggcccctgcagggtgggccttgcttttatgctgagctcatgctcttctccaggtgaccctgtggccgatgactaagcaaagtggcatcacagtgacctcaccatttccaccccacaagactccgccaacaggcagtctgcccctcagagcgccccatgggcaggagctttgtggctgtgtcagctgtgccacatcctcctgcccagcccggcctccttcttcttacacaggtgccacatcctcctgcccagcccggcctccttctccttacgcaggtgccacatcctcctgcccagcccggcctccttctccttacgcaggtgccacatcctcctgcccagcccggcctccttctccttacgcaggtgccacatcctcctgcccagcccggcctccttctccttacgcaggtgccacatcctcctgcccagcccggcctccttctccctacgcaggtgccacatcctcctgcccagcccggcctccttctccttacgcaggtgccacatcctcctgcccagcccggcctccttctccttaccgggtgccacatactcctgcccagcctccttctccttaccaggtgccacatcctcctgcccggcccggcctccttctccttatgcaggtgccacatcctcctgcccggcctccttctccttaccaggtaccacatcctcctgcccagcccggcctccttctccttaccaggtgccacatcctcctgcccagcccggcctccttctccttacgcaggtgccacatcctcctgcccggcctggcctccttctccttacacagatgccacatcctcctgcccggcccggcctccttctccttacaaggtgccacatcctcctgcctggcccggcctcctccttcttaccaggtgccacatcctcctgcctggcccggcctccttctccttaccaggtgccacatcctcctgccggcccggcctccttctccttatgcagatgccacatcctcctgcctagcccagcctccttctccttaccgggtgccacatcctcctgcctggcccggcctctttctccttaccaggtgccacatcctcctgcccagcctggcctccgcccttctccttaccaggtgccacatcctcctgcccagcccggcctccttctccttacgcaggtgccacatcctcctgcccggcccggcctccttctccttaccaggtgccacatcctcctgcccagcccggcctccttctccttaccaggtgccacatcctcctgcctggcccagcctccttcttcttaccaggtgccacttcctcctgcccggcccggcctccttctccttaccaggtgccacatcctcctgcccagcccggcctccttctccttaccaggtgccacatcctcctgcctggcccagcctccttcttcttaccaggtgccacatcctcctgcccggcccggcctcgttctccttacacaggtgccacatcctcctgcccggcccggcctccttctccttaccaggtgccacatcctcctgcccagcccggcctccttctccttaagcaggtgccactcccctatagccttcacattccttccaccaactcagcatttgcttctgggaggacccgacccgagacactcacgtaaaagaggatgcccacgtacagatgtggcagcaggccctccgagctgggattcagacccaggtcagcacgactccaaaatctttcctcctctgcagctccttattccatggttcagcagggaggcgggcgggctggaggccccggcacctgctgtatgtggtctctatccgaggccatggtgaaagcagggaggtgggtgggctgggggcccagcacctgctgtatgtggcctctatctgaggccatggcgaaagcaggggccctggtactagggtcacacaaaggccactgtcattctcttgggattcggtttctcctttccctaaaagtgccaagcattctcacgccaattagctcatttcctgtctcatctcacctctgtggtggagcagggcatgatttttacgcatgcaacgtcttcttacgggcatccctgtgaagcagggccaccccggggcacaggagggcctggaggtccagggatctaaactcattccattcacccagccttaaggagaagaaaaccgaggccaggaagtcagcaagaacatgaagtcggtgacccagcatccaggtccccggatttgccacctgtgtccttttgtggggcttccctttgtaaagcttgaaagaataagaggatcttaacataattttaaaactggaagagaccctggtgaccatgtcatccgaagccctcattctaccgtggaggaggtgtgggcccagagagaagggaggtccttgttggcgcagccggtgagcggcagggtgtgtcccggagcccgggtttccagcgccctctctgtcttgctgccgagcgtccacgtctgttcggttgtctttgcacactcctggctcccagttagaccgctgctcccaggcggaacgtctgccacagcggacacgtacatgcggccaccatggggactgaatgagggtgggcccacaaagctctccaacgcggggttctgacagaaagcccaacccgggccgaaagccatcttttaaaatgaagtt

SEQ ID NO: 8698 - DNA, 29429 bp, Homo sapiens
  misc_feature (1)...(29429): n = A,T,C or G, or insertion/deletion polymorphism (see Tables 1-2)
cacacattgaaggtgggaacataaaatggggcaatttttctggaaaactgttttgtgatcctcaacatagaattaccctattaatcatatctataattcatataatttcatatctaggtatttacccaaaggaactgaaagcaggtaatggaataaatatgcgtataggaatgtttgtagtagcactattcacagcagccaaaaggtggaaagaaccaaatgttaccagtagatcaatggataagcaaaatgtagtataagcacagaataaaatattattcctgtataaaaggaaattatgtactgatacatgctgtgatgcagatgaactttaaaaacattatgctaaatgaaaagggtcagaaacaaagatcccatactgtgtgattccatttatatacaatgactaaaacagataattaaataggatagaaagatttgtgtttgccagggataggggtatggccaatgtgagtgactgtttagtggggatggagttttctttgggtgatgaaatggtttagaacttaagaggtcgtggttttgtatttgtacgaggtacccttgccattaaattatatatttttaaatggttaattttattttttgtaaattacacttaaagaaaacttatttaaaataataaagactatgttcaaaatatctggcatagccaaaaaacctagaagcacagtcagagaaaactcaaactatttttttaagaaaacatttggaagatatgttaatattgtaaatgtataaataatacttaaaattaaggagaaaagaccaaaaacacaatagaagatgggacaagagatttgtacagtttccaaaaaatataataatggtccttgaaaatatgcaaagatgaggtgcagcaaaccaccatggcacatatacctatgtaacaaacctgcatgttcagcacatgtatcccacaacttaaagtaaaataaagaataattattattattataataaatgtcataacattttagagggggaaagaaaattagagattatcttatacaacttggttattttacaaatgacaaagctgtgtttctaattctttaacttgtgaataaatgtgatgaataaatgtggaaaaaaaggaatataggcctgactgtgacatttacagggttcagggcaagaatacaaatggaggcctacctaccatatgccttgatatttaagtgtacaaagcaagctaataacatgtaaaataaaatatgttctacccttataaaaaaagaaaatatgcaaagatattccatgatatttacaaaaaaaaatacaaattaaaactacatttagttaccatttcttaccattagattgggaaaactttaaaaacatcaaaataccacattctgttagctagtgtcaaggcaagacattcctcatacattgcttctggaaatgaaaaatagtataaaatataaaggcaatttgacaatatgcaacaaaatacacttctattcccattttggccctgaaatcctactttttgaaatgtacccttaacatatatcatcaacagggagaaaatatatatgtatgagtttatgtatcatggcattgtttgtagtaataaaatattggaaaccactgaaatgcccatgaatgggtgcagtattgaataaagcacacaatggagtttgtggagttgtgaaaagcatgtactctatatgaagtgattttccaggatatattgttgagtgaccatagaaggtttagatgaatgctaccttttgtttaagtaaacagcgaaaataagaaatctacatgttttctgtaaaaactggtaatgataaaccagaaaataatgaaattggttacacatgggtattaggagtcaacactgtggaagtggtgcggtggaaaggaggggagtgagtggcacttttctgagaataacattttgtatagtatagacttatgggaatatgttattgattgacataataatataaaatcaagaatggagataaaccaggaaacttaaaatcaaagaataacagactaacctaaatgcattcaaatcaataacacagactaaagatgaaagcaagaagtcatttaagtaccatattaaacacagtacagtattttgagtatatgtcctcagcataaagacaaaaagaactgtaatgatgttgaactctagttagctgagttatttttacaataatatgacttagtaattatgaaactacctgatgcaatggtttaaatgtttgtggaccactaaaattcacatgtttaattccttacccccaataagatggttttaggaggtagagcctttggagggtgattagattatgagggcagaactcttattaatgggatgagtccctttgtaaaagagacctgaggaaacttgttcatcacttccaccatttgaggacattgcaacaaggtgccacctatgaaccagaaagcagccccacttcagacataaaatctcccagtgccttgattgtgaggaataagtttctgttgcttataagccagctagcccatggttttttgtgactaagaatattggtattgagaagtgggattgctgttgtaacaaatatctaaaaatgtggaagtatctttgtgactgtataatgggtagaggctgggagacttctgaaatgcatgctaggaaaaacctacattgtcatgattggactgttaaagacaattctggttagggctcagaaggacagaatgagagctagagaaagcatcagtcttcttagagtaaacctatgtggtcacgatcagaatgttgatagaaatatggacagtaaaggccattatgatgagacctcagtcagaaatgtggaacatgttactggaaactgaagaaagcggggttcttgttataaaggggtaaataatttggctgaattatattcaggtcctagtgttttttggtaggtagaacttgtgagcaatgtaattgaatatttagctgacactatttcttaacaatgtgttgaagttgcatcttgaataatcttgactacctatagtaaaatgtagaaagtgagaagtgactgaaagccggaattactaattaaaaggtaaagagaactaaatacttttaaaatttgcagcttatctactttggaaaacatgcaaaaccctgtcctggagaaaacaagggtgtggctgaacaactgatttatgagattagtatggattgaccatgttgactcaaaccaggacctattgtccaagacaatggaagaatgaccccagaagtatttcacagatcttggaggctgctcctcccatcagaggcccagagcacagggacgtgggcaacagcagggacctttgatgccaggtgccgcctaacatctcaggctcagctccttgcatacactaccactgagagtatcaataaattttatcttttgtgaatgcagagtagagtaaggatacagctgtaattggtataggaatagccatcactcaattttcaagggggcattgaaaatttgtttggcactatgtggttgctcagtcaccttaatttttgtccaaaccaaactgtgaaacgtcagccaggtgcagtggctcacacctgtaatcccagcactttgggaggccaaggtgggcagatcacgaggtcaggagattgagaccatcctggctaacacagtgaaacccccatctctactaaaaatacaaaaaattagccaggcgtagtggcacatgcctgtagtcccagctacttgggaggctgaggcaggagaatcacttgaacccaggaagcagaggttgcagtgagccgagatcgcgcactgcactctggcctgggcaaaacagcaagactctgtatcaaaaaaaaaattgtgaacagtctttttttaatttttttttatttttttttactttaggaaaatggatacaggacattagactctttttaaaaagaaaaatataggtcgacaggtcaatgtatgtttatttgggaggacaaaaaatatggtttatcttcaaaagagaattttagatgaattgtttcctgatttagctttatactattattaatgtctttcaactaacatatgccagttttcaaattgtttcctataatgaagatattttaaccaagaaatggaaaggaagaaactcttaataataaatcatgctccgtcacctatagaatcttctccagttttatggcattgaatcagacattgggtgtcagattgataccaatgccaagctcttcaacagttatacttgctttaagatacttagcaattcactaacttctctgaaatttagcgtttctacatctaaagtagaaatattactaccatgagaatgttaaatgtagcttttccatgaggacacagcttctccattggtggctggaattttgtttttcctgtcaaaccagtggtaccacagcatctggactagggctgtaactgagaaccaccatttttctaagagacagcttatttatttctctctcttttctcattcccttagttccccacttcctatgtagccctttaaaaatgcaaatatagacttttacctccccttcaccagacacttcctacagggaaagttcatctaactgtgtgctccaagccagaactctcctccagaattaacagtcaatttacaaactaaagcatgctggcctctgaactctcactcaccaggaggttgcctgaagagacaacagttgaaagcgtgcctgctactctctcccttctggttacaacttatttctgcccatgaaaaagccagctcaactgcctaatagataaggcaccaagccagcacacagaccccttccctcttcctcccctaccttttaaaagtgcctgctttctgctctaaaagccaagccgtgcacttaaagacaacacctgtgctacttcccctacgctagctctagaataaatcactttctttataccagatctccctcttgttaactggacgttgcaaacgggaagccactgatctacttttcagttacaggggctgatgctttcctggcttctcattgcccctcccaacccattctacctggctcattctttaaaccagtggtccccaaccgttttagcaccatggaccggttttgtggaagacaatttttccacggactggggaatggtttcgggatgaaactgttccacctcagccattagattctcataaggagcgcctgacctagatccttcgcacgcacagttcacaataggatccgcgctcctatgagaatgtaatgctgggctgatctcacaggaggtggagctcaggccataatgctccctcacctgccgctcacttcctgctgtgccgcccggttcctaacagtcagtggaccggtacaggtctgtggccctggagttggatatccttgctttaaaccctgagcctcctttcagccatctgacggctcaacagtcactctatctagctccttgaatattgtatctcctcgcttgttccctgtccaagaacactcctgtcaatcatgggagacatttagacttcataaattctttctattcaatattttcgctcgaggactctgggaaggacaactgtcagggtaacagtctgcattccccaccaggaacctggggctatgaaattcgttccccgtgggtgttgcgggaagtgtaatcgaggagcaccatgtagtcgcaacacttgagcctaaagggtgaggtgatggacattttccttttgcatctgaggctctgcagtccagacaccttgcgggattcctgatacttcagctcaggtaggcgtttccggagaattctgggaagagtagtccattttacgggaagtgtagtccactggctcgtggaacactgggtattttggctctggcaggtgaaccgttgaattctgggaacgatagtccagacactctgcggagtcccgggccctttggctcaggggggcgggtccggggaattctggggagtggagtccagacactctggcgcagagaggacacttccggtctcctagtctgaggttcctgctttaatgaccggggtagtttgagccatttctgcgtcttgcaggacattttgaacgaaccccctttgcttgaggctcgcaaccacccgatgatcgatgatcgtctcaggggaaaagaagccttggcgaagagcagaggtttagaggtgcgagggcggggagggtgtttattgttcccktcagcggagccttctggcgtcggggggctttkctcgcctcccggggggtgggattggggtggccttgtgtgccctgctctgagggtttccaggactttgacctcgctcagtccgcctccctacgtatgcagtgtgtacactctttctcgcagtgtgatgtggaatgttaatgtctctgtacttcccattgctgttctttaaaatggtgcttatagggtcatcctaatagaattgttttgcgaattgaaagagataatacaaatgaaagccttaaagttgtccctgtcacttggtgagtggtctcttgttgcctgatattttaaaacgtttgatatcatttcaaagctatagaaaaattgcaaaaacagtataagaaattctcatataccctttacccaaatttgccaagtgtttacatttttcctgtttgctttgttgatgaccatcaaccaaataccaccaggaacatacctgtaaccagagacagctgattggtagctttctgcagcaaggaagcccacataccacggtaattgtggggtgtcttggtaagaggcatttaggaagggctggttatagggtttcacataacatggtagataatattggatattatgttaaataatactgttaccgattacatgtcagatagatgtgttaaaagaatactagtatttgtagtgtacttactagatagtgttggatagcatattacctagcatcatgttatctaatctgcagttccatatacgaatttgttaaatttttcatttaaagtccttatgactgtcctctgccccacccttcacctattcaaagtccagtttatgcgttgtctttagctgtcacatttccatagttgttcatttggagtttgatattgaagggggcctgcctctccacacctgtgggtgtttctcacaaggtggaaatgagaaactgagaaaagaaataagacacagacacaaagtatagaggaagaaaagtgggcccaggggaccggcgctcagcaaatgaggacctgtaccggcactggtctctgagttccctcagtatttattgatcactatctctactatcttggtgagggggatgtggaaggactatagggtaatggtggggagagggtcagccggaaaacatgtgagcaaaggactctgtcataaataagtttaaggaaaggagttgtgcctggatgtgcacataggccagatttatgtgtgactttacacaaacatctcagtgcagtaaagaccagtattgccgccagtatgtctcacctccagccataaggcggttttctcctatctcagtaaatagaatgtacgattgggttttataccgagacattccattcccagggatgagcaggagacagatgccttcctcttacctcaactgcaaagaggccttcctctttcactaatcctcctcagcacagaccccttatgggtgtcgggctgggggacggtcaggtctttcccttcccacgaggccatctctcaggctgtctcagtgggtggaaaccttggacaatgcccaggctttcttgggcagaggtccctgtggccttccgcagtgtatggtgtccctggttaatcgagactggagaatggcaatgacttttaccaagcatactgcctgcaaacacatttttaccaaagcacatcctgcacagccctaaatccattaaaccttgagtcaatacaacacatgtttctgcgagcacagggttggggctagggttacagattaacagcatctcaaggcagaagaatttttcttagtacagatcaaaatggagtttctcatgtcttcctttttctacgtagacacagtaacagcctgatctctttttctttcccctacagatatatttcacatttaggtttagattatacattgttggtggggattccacaggagtgttaagatgcccttttctttttttttttttttgtttgagacagttttgctcttgtcacccaggctggggtacaatggtgcaataggatgcccttttcattgtaacataacaaggtccaagtgatgttcgtttgtcccttcattggtgatctcagctttgtcactggccaagaagatgtctttcagatttttccactcttatgttacttttttttaaattatgaagtttcttatgggaaaatacattattagtgggcattttcttgtaaaaaagagcttccatttctcctctattggttcattgatttgttcaactataaatattctatcaatgtggactcagaatccagtcttattgattctaatgatatgtgcattaacagttttttttttaaactctaggtttattttagttatagcattcacccatttcaggtatacaagtcagttcagtggtctttaggaactttgaagtggggtaatcatcatcataattcagccgagatcactttcatcccccagttggactcctcatgcccatttactttgaacctcattctcaactcaaatttagaacaactgctaacctactttctattctattctacttgtctattccagacatttcatataaatggaatcgtagggtctgtgggtttttgtgacttgcttctttcatttactgtaatgttttcaaggttcacgggtgttgttgcatgggtcagtatttcattcctttacatttccaaataagattccattgtatgaatatgccacaatttttctgtccctttacctgtaggagagctttttggttgtgtgcaatttggggttagtatgaataatgctgctgtgagcgttcatgtgctaattgacaatatgwgtccttgttggtgggtgacatccctggccacmctttcatgtctctttttctgtcttcatggcactttccaggcacaattctsctttccctggaactgtgtcattcaggactctgcaaattccctaaagtaggaggaaaaatgaccatgtccaaggtaagtaggacttgcctctcttactgttaaaattccatctcactactcagattgttgtgtgtttttctctgccctgggaagactcaaggagaacagcaggactttgaggatctcttgtcacctggctaatttttgtagtattagtggagatggggtttcatcatgttggccaggcttgtatcgaacttctgacctcgagtgatctgcccgcctcggcctcccaaagtgnnnnnnnnnnnnnnnnnnnngataggattatgcgtatgagcatgaatgtctgtgtcctccctgcctaaattcatatgttgaatttttttttttcagagcctcgctctgtcacccagagtgtggtggcatgatctcagctcactgcaacctccacctcctgagttcaagcgatcctcccacctcagcctcctgagtagctgggactacaggtgcgcaccaccacacccagctaatttttgtattttagtagagacagggtttcatcatgttggccaggcttgtatcgaacttctgacctcaagtgatctgcccgcctcggcctcccaaagtgctgggattataggcgtgagccaccgcacccagccagaaagccttcatttaaaatggctagtaatactgggctgggtgcagtggctcacactggtaatcccagcactttgggaggctgaggcaggcggatcacctgaggtcaggagttcgagaccagtctgaccaacatggagaaaccccatctctactaaaaatacaaaattaactgggcatggtggtacatgcctgtaatcccagctactcggtaggctgaagcacgagaatcacttcaaaccgggaggcggaggttgcagtgagctgagattgggccattgcactccagcctgggcaacaagagtgaaactctgtctcaaaaaagaaaacaaaacaaaaaaagtctagtaatactgaagattggccagtcacttgtgtactgtcactcatttacttctcaaagcagcagaatgaggaggttcctgatctcttctcctaaactcatgaaatatgagaaacctgctcaaaatcagaggcaatcaaggaacaggaatgttagccattctgctcaagtgaaagagagagacgagaagaaagaaaaattctccactgagggtctggtgacctgttgtgtggrtgtctggagtgctcccttgagtgatgacatccataggtggcgctgcttctccctgtcctgcgttggtgtgacctcttcttttccagacctggcacctactcaggtgtactcattgttccaagtacccaaggacagtgattaccacagctgttcttatctccaaattcctccttatggcacaagatacctcacacattttttctttggctgggcgcggtggctcacacctgtaatcccagcactttttcggaggctgaggcaggtggatcactaggtcaggagatagagaccatcctggctaatatggtgaaatcccgtctctactaaaaatacaattgtgccactgcagtccagcctgggcaaaagagcgagactccgtgtcaaaaaataaatataattattaaaaaggattaaaggaggtcaggcatgattgctcacacctgtaatcccagcactttgggagggcaaggcaggaggattacttgagaccaagaatttaaggccagcgtagacaatgtagcgagaccccttctctccgataaatataaaggttagccaggcatggtggcatgcatctgtagtcccagatagtcgggaggctgagtgggaggatcacttgagcccaggagtttgaggctgcagtgagctctgattgtaccgctgcactccagccaggggaatacagcaagatcctgtgaccaaaaaaaaaagaaagaaaagaaaagaaaaaaagaaagaatctggtgcgtagagcaatgtttcctcagaaaaacgagtaaagctacactgagactagctatcaaccactaaaaatagaggcctgaaagagtggnnnnnnnnnnnnnnnnnnnnttcctccttatggcataaaatgcctcaccattttttttttttttttttttttttttgagatagagtctctctctgttgcctaggctggagtacagtgttgcgatctcagctcactgccagctctgcctcccgggtttacgccgttctcctgcctcagcctcccgagtagctgggactacaggcgcccgccaccacacacccggctaatttttttgtgtgtttttagtagagacggggtttcaccgtgttagccaggatggtctcgatctgacctcatgatctgcctgcctcggcctcccaaagtgctgggattacaagcgtgaaccaccgtgcccggcccgcctcacacattgttaccagaaaaaatgacaacctggggcaaaaatatttaccccttggatagttaaggaagaataaatccagaataagaatcttctaaaaggataaagaaaaaagttcaaacagattggaacaaagaatactaaaaggcaattgtaaaagaagaaatagagatcgccaataatcttgaaaagtggtgatactcatttataataataagtgagaatgatagaatgaattrttcttcctaatcagattacaaaaccatgggaatatttataaactgctcttggctatcataaggagaattagggtacttgtattctgttgaatgattagagaggtagggaaaaaagtgagaagaaagtatgcaattatataatgataatattaaatgtgcttatttttcacattttaattttcatatgaaattattttaaatgagacagagtcagatgttcttacatcttactacttaccatatcatcttggccggactgataatggaaaatatgtgaaattaaatatttattatttagtgtagctaaaaatagatcatcagttccctggaatactatggaaccctgaaatagataatggtaataacagtaataartaataccagctaatgttcattaaacagtctgtgccgtagacttttcaaaataccgtatatttcttttcttaattcttgaaaaaactcttgtcatgtaagaactattattcagagagggaacaagccttgtaggaaaacatgtctgaggtcacatggttagaaatgggcagactctcagaatgtgcactgaggcattctggcttctgatcaggacactaaatgctgcaataagcatatgtggtttgtgccttgcgagtacagaagacacactgcataactgtctcagggtaccatggagcaggttcactgtgcactgattaccaactcgtgtgagtcytgtgggacagaacacattcacacgcaacagattgcatgaagcagatttattactacagattggcagcaggcgagcccagaagcctagggtccagtrtgagctggccatccagggctcaagaaagctacctggagcagatggaatcttgactgtatgtgccccacttgcaccagagctgaggcaccccagaaggtaacctgcccccatttatatacttcagggtgccatgactcatggagaaaaacttgaaggtcatcttccttccaggtgagagaggaacaaagcccagactgtcaaaggcagttcctccccataatattgcattcttagaataatctacagttattcttgagaactacaagcaataaaggggagagagctgggtggggtctgcaccccaactgtcctgcagtccatcccctgacccagatatccctcttagcaaactggtccatttcatatgtccatcgacctcccctggcctcccctgatcttgttagatcagtgtaacaccttgactgacacaatctctgccaacttcatggaattatagctggaatacattccgtggaccccagaggagcatgaccacaagcagcacagccagaccttcctgaagtagtaatcctgcccaggtcccagttatcaaaataagaagctgctgaagataccaaagaagaatcattcaggtggccccagtgtctgaagccagtggacctgcttctgggttgcctctcattgagtttttacaatagctatgtatccagagaaggccggaggtgttggcagttgcagacccactcctcccagtagggctaaaagcacagagcacttgtgttttttgaaccttcctgagggagtgaagggatgttgctgggctcccaaggcagtggccgtggaataaacagtatctatcggccattgcctrtggcaggtgtctcatcatttttcatgggaattcacttgtaggtgtaggacataaatctggagctagctgcacctccaggcaggtccccagtcagcctggggcacagctttagccttcttgcccagtggtgcatctcgcttccagggtgacatctaggggcacccccagcatgcctaatgtttgggatctaacagtctgccagctttccaggcatgacattgcccaccctgtatctgggtcaccctccaaaccaaccacagagaaagccataaggctcaggtgcacacagcacccattcccttgtttggstgttctgtgacccatttgtgggaatggggacattatcttttgccagccacatctcatttttggcacagttgcataaggtcagttcccccagtatgacattcatgcggcccttacagagaggaataccactcatccagtcctggttttcattatgtggaacatttctcatccaggtaatcaaaggaacatggtgcgagaaagcacagtccactgtagctttgttgaggttgtgtgattctgctgccttacaccagttaccacagggccctccagctctctctcatgtggcagrtgccaggttctgacgtgacaagccagggttatggagctgttggtgtgcactgtggcatgaaggatgctggtgtggtttaccatagtcaggatgagagggtcactgtggttggtgatagaataaatgcagggtagcagatggaacacttagccaggtgacatgaggtgactgcagcttgagataaggaatgtgctgtgcttccaggcctctgctgccatatccttgggggaacagcagattaatagctgttggatagtgggtgggctgaggtggtgcagcgacccagtctgtctgtccctgtcctgaggctactaccattgtagacatccattcccctggttgtttggctcagaccttcctgcctcagttgttcagtcaggaagggacgtcacgtcctatacaaaaaatgcctgctagtgccagccacccaaatgggatcaggtgtccccagtaccatcagaaggaccctggtgacccctatggtattccgtggtctcattcttcaccactgtgggatcccatagaagtcaggggatgttcaggaaagcatcacctccagattagagtcaggaggacctttgtcagttaccgcggtgatctgaaccgcaaattaccaacaggatgtgcattataaaggggaaaaggaaaaataattattgggaatactgagattggggtttcacagccacagcctcatcaaccggctgccaggtcgggcagatactgactgaattgctcactgtcgctgggactattagcaaggttcattgaaacctatatacgtgtagcccagtatgcagcatttagactcctagggggctacatacaagtaaactcaatgagttcactaaataagaccacaagacttcttygtcgttggacttctgatgacgcttgggacaatcaaggtgtgtcattgtcaggacacagactagaatgaatgggaattctataagttgacctacatctctgaagatcctgaaaaactttccatttttcctcttggcctcctcaatgttccttctctcccagtaaccattggtagtgagattgaggttgcatatgtttgatgctgtaggaggcagtgaccttcaaggatgtggcagtggtcttcactgaggaggagctggggctgctggaccttgcccagaggaagctgtatcgagatgtgatgctggagaacttcaggaacctgctgtcagtgggtgaggacaggcatcttctataagggaatgtcaggccccaggagtggttttgtatcctagggtgttcaagtttgagtgtgcagtgggaacctaaatttccaataagtgttaccgtgatattatctaraatatgttgggattaagcatgtgacttttcctgtttacagggcatcaaccattccaccgagatactttccactttmtaagggaggaaaagttttggatgatggatatagcaacccaaagrgaagggaattcaggtaagaagcacgcaactgtgtgtccttgtttgtgacttccatctgttttacttctgtgcacgtccaactccattaccttcttctaaatggccaaacatctttgctggattatkataacctccttccagctrgtggccctgctccgtgccttcccactctgacatctgttctcctcatggcagctaaagtgatccttaggacatggatgtcagattgtcattcctcagcttaagagcctttctgtcttcttaattttatgaaagcctctttaagttgcttctagaaacccctgtggtctactcttcatttttcactgcttcttgactacatctcccatactctccctcattctccatcttttctggccaccttgtcatccctcttatttctccatcctgccaaggacactgtatcacctgttgctggtacccartgaccacgaacttagatgattaaataagaagcatttattatttctctgttctttaggcctgaagtctgacacatctcactgggaaaaaatcaagctgtcttagggctttgttcctttctggatgttcatggggagaaggcttcactttgttttaccagtccctagacactgtccacactccgtggctctagtttccattcctccatctttgaaggcagctacattgcatccttgaccattcttccagagtcatgctccctctgccactcttcttatgcctatgtctttcacctttcaggtcccttgtggttgtattcatcactcctgtatgatccaagttgactttcctactttctgcttagctgattagtgacttcaatgacatctgcagccttaatctgccttgctgtgtaatgtgtcagaatcataggtcctgaaggctggatgtggacatctttcaggaacaattatgttccctaccacagaagcttctgcctcagggccctcacttgcttttctctctgactggagtcctctgttcccacaaaacttactgaccccctctgttagtttatgcaggtgtctgctgagttttaatgtcatggaagaggtcatcttcaagcaccctattgaaaataccatcctatctttacttggcctgcaagtattatgtgtcatatgcttttgtttactgatagatcacctgttccctttcaaatataatctctacaaggtgtttatctgtttgtttatgactgcatcttcagtgcctagaatagtcctagtacatggagggatctgtaaatatttggtatcctgatgaatgaattaatggatggggggacttcactgtctgtaggaatcatggagctagctaataagtaatacatgaaccagagtgtatgaaatatattagtcccttggaagccataggggtttgatttcaggaccccacatggataccgaaagccagagatgttcaagttcctgatatatgtgaagtctttgcctataacctatgtacatcctcccatatactttaaatcatgtctagaccagttataataccaaatgcaatgcctacctgtcacttcattcacaaggattcaacataggactcagtgtgtgagaaattccagttttgctctttggaactggaatttttttccctaaatattttttatgtcctgttggttgaatccatggatgccaaacccatggatatggagggctgattatatattgcagaacagattttttttttctctgtggatggctgcttatccattttcaactttcttaggtttccttgacatgattggttttatgtgtgtgcagytgacccatgtcctgtggaaacttctaagcatagcattttttttttcatgaccacactgagtaatatgccttccctgggacctaccctggagctttccatagggagcatatttatatctgagaagaaagtctttttgaatgaggatttgcagctagctttcctttgagagatttacccatctgcagcccatttgccttttccaaagtcggcccacacttcactgcctccagttcctccttccttcccttagagggggaagaatgaggatgagaggacacaagttatgtagctgaatgttgactctgtttctggtcatctttcttcaaaaatgtgcgtatttcccttttctttacattatgcaaatttaattgtcaaaaagttaaaggacaggctttttgtttatttttatagatttagtgctatattttgaactagtaagctttatgacctggaaggaattggggaattacttactcaaaatagaaacatcctgagaccccttcccatctccttaaagacctcttatttataagtcacagtgtattaaatatatccatgtacctattagacaggattgttcccttgaccatctttgcgggcaggaacttcagggtttgtttcactcagcccaccgctgtcgattccttgcaggagggagtgtgcaagcgagcaagtgcaggaaccggagcaaatgaatgctggaattggctggtygctcctctctggcgagagcaggctctgttrtgcacgccccacagcagtgtccaagcatgttacaacccatgctgtttcagctctgccatctggggatggccaagtgccaatcagctcagtggagcatsagggtagcagcccctgccctcttggcacctgggttcttgtccagcatccaggaagaaccaggtcacatgaactgtgtgaaaggtgatgaacgcagaagactttattgagtggtgagtggttctcagcagaaaaggaggctggaaaggggctgggaaggggatcaacatgttcctgaagccaggccatttgtggctgggcccctctccaaagcagcaccttctgaagttagccacatctatccatactttccgacactcagttgcttctctgctcaccgctcagcgacttgtatccttgccactcagctgcttgtgttgctctgccagctgaaatcttttatggtcacaggatagtggcaggcaggccaaaaaaagcaacattggggcagaaaaatggggtcatctgttttcacttagggctgaggttctaggcttaagggtggagtttggctaggtatactgatgggtacccacttacctattaatattttccaagtttcaacctttggaacttaactctccatcagaaaaatttacctaattcaggacttggtaatatcctgacaaagttttgaacattttgwgagcatgaaccataataagaaacacctctttcagtataacctggacagttttcatgcatgtaggtgtatgtgagtgactttagctgacatttcatgtaacgacacctttcctgcttgtctccacactgtgataattttcattctggctcctttctataaatgtctattgaaggttttaactttatttcagctcactgatgtgtagtcttgaatataaaaacagttaaaaaggcctgtttatctacatcataggctttcttttcattccaagtgattcttcacatcattgattgtctgatgaagagcatcctcctttgtggacctctggaaggacagcctttcagattcccctcagaactgcagttgtctgtctctgtactctttcagataaccaacttatcatccatatcaaaacagaaaaataagattaagtattttatatgtgtcatgcaaaattcttgtataggaatactttcgatttgtagatataaacattctaaggtgtttgatgtttagtatcatgaagggttaaactaaaaagtttaatgggacattttacagagaactgctctcacttcactccaagtgcaaattcggcagtttttcaaaactaccttcacattcaataatttcctagaaagaccctcagaactcactggatgyatttattctcacagttactgatttttacaagcaaaagatgcatattatagttaaccaagggggaaaaaccaaataagacagagtccagtgaagtaccaaatgtggatctcctattgtattctcacagtagagtcgggcatgttacatacccaaaattagcatgtgacttagacacaaggaaccaccaatcagggaaactcaactgagtgctgggatccaagtaattattggggctccattacatagccataattggttggttgattcctrtgtggttatttagtcttttggtccactggttccctgtgacctaaagacctacattaaatcacatcgttattttttctgacatggggaatgccacctgccatttcccatcccccaaagctgtggctagtcacaaccctaaattatattatttcactgtcaagagttacccaagatttgcccccaagcaaacagagagactctcctcaggcatgccccttcaagattctacagattacctctcagatactgaggacaaagtcctgacctctttttagttaggttaactccttttcttatttttaaaaatgttttttaagccatcttaaactgaaaggaaggttaacttctttataaggatatataatatacaggcaaatatacgaagtatttattatgttactgctttcccttagagttccttttgattcatatttcattacgtacataatagtttagtaatttatcatgtaaaatttcagactgagttggaaattttaaaaacagtaacaggttaaatgtatgtgtcatattaattttttattaaaccttttatttctatcaatgattttttatttgaaatgtggtatgtttttttctttcttttcttttttttttttttttttgaggcagagtctcactgtgtcgcccaggctggagtgcagtggcacgatctcggcttgctgcaacctgcgcctcctgggttcaagcaattctcctgcctcagcctcccaagtatctgggattataggtgtgtgccaccacacctagctgatttttgtatttttaatagagacggggtttcactatgttggtcaggctggtcccgaattcctgacctcaagtgatctgcctgcctcagcttcccaaagtgccttggtctcccaaagtgctgggattatgggtgtgagccaccgtccccagtgacatggtatggttttagattactctcatgcaaaccagaaaccagggtgcacttggaaaacacaaactgaacattcgttgaagtttcataccatgtcctaagtgtgaactcttaaaaacactgaacagggcatagcttgtcctgatctcttaattttgtattctgataggaggcaagatccaacctgagatgaagacttttccagaagcaggaccacatgaagggtggtcctgccagcagatctgggaagaaattgcaagtgatttaaccaggcctcaagactctaccataaagagctctcagttctttgaacagggtgatgcccactcccaggttgaggaaggamtatctataatgcacacaggacagaaaccttccaattgtgggaagtgtaaacaatccttcagtgatatgtccatctttgatcttcctcagcaaatacgctcagcagagaagtctcattcctgtgatgagtgtggaaaaagcttctgttacatctcagcrcttcatattcatcagagagtccacctgggagagaaactctttaagtgtgacgtgtgtggtaaggaattcagtcagagtttacatctgcaaactcatcagagagtccatactggagagaaacctttcaaatgtgaacaatgtgggagaggcttcagatgtagatcagcacttacagttcattgcaaattacacatgggagagaaacattataattgtgaggcatgtgggagggccttcattcatgatttccagcttcagaaacatcagagaattcacacaggggagaagccattcaaatgtgagatatgtagtgtgagcttccgtcttaggtcaagtcttaataggcattgtgtggtccacacaggaaagaaaccaaacagcactggggaatatggaaaargcttcrttcgtaggctggatttgtgtaagcatcagacgatccacacaggagagaaaccatataattgtaaagaatgtgggaagagcttcagacggtcctcctatcttttgatccatcagcgagtccacactggagaaaagccatacaaatgtgacaagtgtgggaagagctacattactaagtcaggtcttgacttgcaccayagagcccacacaggagagagaccttataactgtgatgactgtgggaagagctttagacaggcctcaagtattttgaatcataagagactccattgccgaaaaaaaccattcaaatgtgaggattgtggaaagaagcttgtataccggtcataccgtaaagaccaacaaaaaaaccacagtggagaaaatccatccaaatgtgaagactgtgggaagcgctacaagaggcgcttgaatcttgatataattttatcattatttttaaatgacacgtaagtgttgtacatatttatggggtacagtgtgatatttaaatatatgtatatgatgtataatgatcaaatcagtgtaattagcacatttatcacctcaattatctcttttttgtgttgagaaaattaaaaattcattgttccagcagtttgaaaataaattgttgtcgatgatagtcacctttagtgctgcagaacagcagaacttcttcctcttatctacctgtacttttgcatccattagccaacctttggccatcccacctatcccttacccttccctgcctctagagccactgttctcactacttctaagaaatcagctttttaagcttccccatgtgattgaggacagtttgaagttagtgtttcagccatagctcagcataccccagtggtcgtgggactgtcagagcagagaatgctgcagggtttctaacagaagtttgacaattagttattattcaggagacaggtcttagtataagagtttgttcacacactttcaaaacactaatgatgaacatgtcaaaattgatgaccactagaatgtcagccacatgtgtctttgtatttttgctgcatccttacattgcttgagtctggaagattgaggctgcastgacctatggtagtgctactgcactccagccagggcaacagagtgagaccctgtctccaaaaaaaaaaattaaataaatacctttctttgtttctagacaagcatctctctgtgtttctggaattttttttttgagtgtacatacatagtgtgttacaattatattcttattttcttcagcagtgaatatttgctggtatttttctattttataattgtatgcattatttttagatttctcagtgaacatcagaaaccccatctctacaagaaatacaataattagccagttgtgttggtgtatgtctgtagtcccagctggagactactggagaggctgaagtgggaggatcgcttcaacccaggaggcagatatatatacaaatggaatagaagtgagagtccataaagaaacccatacatctaaggccacttgattttcaagaaggatccaagattactttatggagacagaatagtctcttcgaccaatactgctgggacacctatacacagacacacaacataatgaagttagattgtacctcaccctacacttaaaagttaactcaaaattcatcagtgacctaatgtaacagctaaactataaaagtattagaagaaaacatagaagtaaatcttcctgactttatttggaatggattcttcaatgaaacaacataagcaaaagcaaatataaatacctaaatgggacctaggttttaaaaaatgctgtgcatacatggacattgtcatgaacatgaaaagaccatacagcatgagttctactatccagattatataaagaattcttacaactcaataacagaaaccactcaattaaaaaaatgggcaaagggctgggtgcagtgtcatgcctgtaattccagcactttgggaggctgaggtgggcagtttacttgaggccaggagttcaagaccagcctggccaacatggtgaaagtctgtctttactaaaaatacaactagctggatgtggtggcctcctgggctcaaaccatccttccacctcagcctcttgagcagctgagactacaggcgtgcaccacagcctctggttaagttttgtatttttttatagagatgaggttcctccatgttgcccaggctggtctcgaactactgcactcaagtaatctgcccacctcagcctcccaaagtgctgggattacaggcatgagccactgcactcagcctaaaaaaaaaaaatcctaatttttatgggtacacatatggagtatatatgttgatacaggcatacaatgcataataatcatatcagggtaaatggggtatctgttaccacaagcatttatcagatttttgtgtgtgttagaaacaatccgtactcgtttagttatttcaaatgtacaataaattattattgactgtaactctgttgtgctatcaaataccagatcttattcattctatctaagcatagttttgtacccactaaccatccccacttccctcaccaccaaccttaactttccctccctctggtaaccaacattctgctctctgtctccatgcattcaattgttttaatttttagctcctacaaataagtgagaagatgtgaagtttgtctttctgtgcctgacttatttcactgaatgtaatgtcctccaattccatccatattgttgcaaataacaaaatctcattctttttgtggctgaatagtactccattgtgtatatgtccatttcctgtatccattcacctgttgatgcatacttaggttgcttccaaattttggttattgtgaatagtgctgcaataaacattgcaggggagggtgcagatatcactttgatatagttttaattttttgaggaacctccatactgttctccgcagtggttctactaatttacattcccaccaacaatgtgcgaggattccctccttcactccttccacatcctcaccaacatttgatattgcctgtcttttgaataaaagctattttaactggagtgggatatctcatggtagttttgatttgtatttatctgatgatctatgatgtagagcaccttttcatatacctgtttgccatttgtatgccctcttttgagaaatgtctattcagatattttgctcattttaaaattgatttattaaattttttcctatttggtttgagcttcttatattctggttattaatcccttgtcagatggatagtttgcaaatattttctcctattgtgtgggttgtctcttcactttgttgattgcttcctttgctgtgcagaagcttcttaacttgacgtgatcccatttgtccatttttgctttggttgtctatgcttttggggtattactcaagaaatctttgcccagaccaatgtcctggaacatttccccaatgttttcttgtagtagtttcatagttcgaggttttagatttaagtctttaatccatttcgattttatttttgtatatggtgaacaacagggttgaagtttcattcttctatatgtggatatcatgtttttctagcaccatttattgaagagactgtccttttcccaatatatatacttagcacctttgttgaaaatgagctcactgtaggtgtagaaatttatttctggattttctagtttacgcagcactaaaaagaatgtactgtacatgaagtgatttctaggatatgttgttacatgaccatagaagagttagaaacgtgctttcttttaagtaataatggaaaataagaaatctacacatactgatacggtttggctgtgtctccacccaaatctcatcttgaattatagctcccataattcccacatatcatgaaagggacctagtaggaggtaattgaatcatgggagtgggtctttcccatgctgttctcgtgatagcaaggacagatagaggagtgactttgaatagaatgggaggcaggtttgccctaagcgatttccagcttgagatttccttagtgattttgggggcccaagatattttcctttcacaatactaagcagtttaatttctcttaaatgtggcatttccacgtctaaagaatattaatatgaaaactttaaaagtgggaagatagcttttccaggagggcaattggccctccatattggcccttgacagggcaggagcatcgccatcttggacaaacactgccattttaaagttcgcgttgatcaaaaactgcctaaatccaaagggcatcagcctaatggctaaggtcagcatgaccataaaccacaaatgacatctccaatcagaaacattccaaccataagataaacccctccctgaccagagacatgccagcaccgagataacctcccttccattggagagatgtcagtcccaagataacttcccctccaaccagagatattccaaccccacaacagacttctccccaatacagaaacattctaagcctgtggtaagctctctctccctaaagccaatacatactcttagtccgtaagagagagcgctcctgactgcaatcggccagaaggccctctcggtttattctccaaaacgaacctgtctttgactgttgagccgcttttcgtgttttttttttttttctctttaactcttacagccctcttaaacacttaaactgtggttgtttttcttgccaaaccagtggtacaacagtgtctggttgtaccaggggctggtgccccactcaatgcctctcccaaaccatttttcctggcccattatttaagctcttagatttagcctcatactattagcgtctagtatattagcctttcagccatctcctgaccgctccacagtcactccccgctaactccttgaagattgtatctccttgctttgttctctttcagtaacactcctgtcatcatgggaggcgtgtagacttcaggaattcctgtctattcaatattttctctcgaggacgcagggagagggaaggaccactctcagggccacagtccatattccaaaccaggcgcttgggtctatgggattcattcctcgtgggcattgcaggaagtgtagtcaaagagcaccgcggagtcccacgcttcccgccggaaggtgatactatagaacgtctcctttgagattcaaggaagtgtagcgcaggagatctgttgaatgacgagcaagtaggctcaggacggcgtatccggggaattctgggaaatgtagttcacacgctgcgcggggtaggggcacttccgctcccggggggcgaggttgctgcagtgcattcggtggtagtttggtgtcagtcctgtgtcttgtcggtccttctaaacgtgtccccttacgatgctggctcgcaaccacctggaagttgactaaggggagaaggagtctcgttggaaaacggaggtttggagggacaacggcctctcttttcgttcttgtcagcggagccttcttggtcttggggctgtcctcgcgtccccgggcatgaggctgggggttgggacttggtcgggacgcgtctcgcctggtttgagggtttttggggctctcagctcgctcagtccgcctccctccatcccacctgtgaggctactttctcacaatttagggttgggatgttattaatctccctgtacctcccactgctgttctttaaaatggggactttaggaccatcctaatgaaatcgttttgggaactggaagaggtaacacaaatgaaagccttaaagcagcccctcccttagtgactggtggtctcttcttagtgtttatttcccacgaagcctgtcaggtccccgggtggggtcagagctccatctgcagggatccccgcccttgtctctgattcctgcaggacgctgggtgatcccggacgcttctgacctctttttaggaaggcgagggttgtttccatttccacgaagggagaggaacatttaacttttatgccggacggcaatgcggtcagggtgtttcacagctttctccttccccagcctgattctcaaaaagagctgcagggagggacttcttggctactgagggcaaagttccacgagagtggtccttggctttttttcttttacagagatgctcaccccgaccaagagtgtaggatgtgtcctcaggcatgggtgttgataataattaagcctcaattggtaactttatcccaagagctttatacaagtagtcacattttcgccacaccgtggctctgtggagaggtactacttttttcagttttaaagatgagtgagatacaaaggagcaggagttatctgagaatagtcacctaagcagtaagaggtggagctgcggttgaaacctgggcgttacaggtcagagccttagttgataatcttttggatacattctcattgaggcagaggaactagctggaatctagtggggaaagcaagctaggacttgattgaagggagccttgagagcaaggcttatgggcttggactgttctgggagtttatcaactatttcattcattagaactatttcatttattacaaatatttcacttgttatgcagcggtatgattgtggagcgttcagaaattggagaaatacgagtagtacaagtttataattacccatgaatccagcatgtaaagatagtaactgttaaacttcgagtgcattttttttttttttttgagacagagtctcactgtgttgcccaggctggagtgcagtggcacgatctcggctcactgctaactccgcctcccaggttcacgccattctcctgcctcagcctcctgtgtgagtagctgggaccacaggcgcccgccaccacgcccggctaatttttttgtagttttagtagagatgaggtttcaccgtgttagccaggatggtcttgatctcctgacctcatgatccaccagcctcggcctcccaaagtgctgggattacaggcgtgagccaccgcacccggtgcatttctttttggtctttctttggcatatttgcatatttatttataaacatttaaacaaaattttatgattaaaaaaatgtgttttcccttatgtgtttaactatggaaatttggaaacactgccaagagggaaatagctagtgaacttacatgttatatcatgctcatcctaatttatctcatcgttatctcattttttttttggtaaatgtttcctgatattggccgggcatggtggctcacgcctgtaatcccagcactttgggaggccgaggtgggcggatcacctgaggtcgggagtttgagaccagcctgaccatcatggagaaactccatctctactaaaaatacaaaattagccagacatggtgacgcatgcctgtaatcccagctactcgggaggctgaggcaggagaatcgcttgaacccgggaggcggaggttgcagtgagccaagattgcaccattatactccagcctgggcaacaagagcgaaactgcatcctctgcctcccggtctcaaaaaaaaaaaatatttaacgttttattttcatatcatttgaaacctatagaaaaattgcaaaaatagtgttagaaattctcatatactctttacccaaatttgccaaatgtttacatttttcctgtttgctttgttcttgctgatcacccagataccaccaggaacatacctgtagccagagacagttgcttgtagctttctgcagcaaagaagcccacatttcaagataattgtggggtgtcttggtaagaggtgtttagaaagggctggttatagggtttcacataacatgctagatactattagatattatactggctaggcatggtggcttatgtctgtaattgtagcactttgggaggccgaggcaggtggatcacttgaggccaggagttcaagaccagcctggcc

SEQ ID NO: 8699 - DNA, 22426 bp, Homo sapiens
  misc_feature (1)...(22426): n = A,T,C or G, or insertion/deletion polymorphism (see Tables 1-2)
ggagtgcagtggcacaatcatagctcactgtaacatcaaactcctcagctccagagatcctcttgcctcagcctcccgagtagctaggaatatgggcatgccactacacctggctcatttaaaaatttttttgtagagacggggtcttgctatgttgcccaggctggccttgaactcctggcttcaaaggatcctcctgccttggcctcccaaagtactgggattacacacgagtcactgcacttggccctaaatatagtttatttaaatgcaggtatatatgatttcatttttaataatgattatttttaacaactggctcacaaaattcttgaaaattaaaaattggctcttatgagctggtataagctggctctagcagagccctggacgtattgaaatatatcttagtaagcatgattcagtgtataattgttcatattcagtgcaagcaacaatggcatgtggcttggatgcaaacaaggaaatccaggggaattcctcaagctgacatgtctttttggatatttgttatatgattaagtcttggaattctgcctaagagcaatgctaagcaactaattaataaagttataataatacctagaccaggatgagaaatccaggctttcctctttttgtctgtactcttttctctttaccgctcccttgtttagccttgtattttattttctcccttccttttctctccatttctctcttgttctttgccttccatcctaattttctctatttgtgtttcccttgttctttctcttttttgcttttcccttttgatcctctcctcccagtgcttttctcttccatttctctctttcctctttaatttttctttcatatttatttgtcctccttttcttccccatgtcacttctaatagatacacatattccttctctgcccctaaagcctttgggataatttctgaggacgtgggttctaagtgatggctcttacaacaggaccattcccagagtgagcagggtcagttgagaggggaagtgggagcgggagtcaggggtagcacatgggaaaatgagagatgagaaatgtcaatatttggtatcattagggaaagtttcgtgggtgcattagagttcaagtttgttggctcattgtaggactgtcatttattaacctaaggctctagtcctgtttgtgtaatatggtagccactagccgtatgtggctatggaatgcttgaaaagtgacaaacctgaattgaaatgtgctgtaagtgtaaaacacacaccaaatttcaaagacattatataaaaaaagaatgtcaaatatcttgctagtaattttttatattgagtacttgcgaaataatattttaatgtggtgaattatataaaatatattattaaaattaatttcacctctttttgtctttttaatgtggttaccaaatctctccaaagtctttcaggttcctagcacgtatctaggatcattttattttattctttttcttttttctttttttttttttgagacgggctttgctcatgttgcccaggctggagtgcagtggcgcgatcttggttcactgcaacctccgcctcccagcttcaagcaattctgctgcctcagcttcccragtagctgggattacaggtgcatgccaccatgcctggctaattttttgtattttcagtagagacagggtttcaccatgttggccaggctggtctcaaactcctgacctcaggtgatccacccacctcggcctcccaaagtgctgggattacaggcatgagccgctgtgcccggccaggatcattttatttgtttgaactaaaatgttctccttatactcaaatgtagtaaatgaatgacaaatgatttaaattttctaaccatgtgagaattttattacttttcatttatttttcagaaataggattcagaaaaaaaaaaaagttgttactattttcacttactgataccagtaattaaagtaaaggagctttccccagctaacacgtgctccacactagaccctgaaccacccgcagtgctcttagggagaatgcaagcccaggccctttcttctacccgtgagcagctctaggtcatgtaactttcctacctgcctggatcagggaccaaggccctcttaaaggcaagaactataaaaatagactgggtgcggtggctcatacctgtaatcccagcactttgggaggccgaggtgagtgggtcacctgaggtcaggagttcaagaccagcctggccaagatggcaaaccccatctctactaaaaatacaaaacttagtcgagcatggtggcacatgcctgtgatcccagctatttgggaggctgaggcaggagaatcacttgaacccaggaggaggaggttgcagtgagctgagatcatgccactgcactccagcctgggcagcagagcaagactctatctcaaaataataataaaaataaaataagctagccgcctgtaaggtggtcatgaatcctctgcccaatagagacgctccatcttgcatagtgaggcaaagatctgatcagatttcccttcttgggggaagtattctcagagcgggcctcagcccttgactgtaagccatgagcctgggaaaaggctgtaggaagacacatatagaagcaaaggcagcaataaagagaagtggggaatagaaagagaagcagattgaggaagagtcaaagagaagtcaagtcatagctaaagtggagagcagcccaaccagacagcctgaccaccacggctgctctgggagtccccagaagccactgctccaggtctctagagggcctggctgtgctgctgtgtttccttacagcctctagtgtctttaaaataaacctccatccccttgtggtaacccaaggttctctgttcattgcaacatatatgaaggcagaatcacagctggcccacgtctggtatcagaggaagacataggagggaaatgtgtgtttgtgtgtttgtgtgtgtgcgtgcgtgtgtgtgcgcgtgcctgcgtgcatgcatgtgtgtaggggcagggggaagttttttaaaaaggaataaaaatattacatcttaaagttatcagcacatatggttctgagcatactattcttggttgctagttgtgaataaagatttaaacgttttagaaatctcaggtgaaggcagagagagtattacataacctcttgggcatctggagtcgtgaaaaaattgtgggctttggaaccagacttacttagttttgaatcttggctccctcccctattggatgatgaccttgtgcaagttttttgttctctctcaaccagtttttccatctggcgaatgggaataaagtatatgttctatgtagtttgtggtggtgattagccaatatcttgtgtgcaatactatctgcacttaggaagtaaatgcaagcttaatgatgatgattagatgacacaagcaacaactctacttggctcaacttgtttttggtaaacaaatgtaaaaacacttaaagaaaacttctccgttttctgacaataaagtatttaaacatgttggtctctggggaaaggaagaatatgtctttggacaacaaaaaccccaagtgattatttttccttgagagggcaatatacagtgtgagtgtgctgatcatagtaatttgagaatttctgaaatgaaaaagattttagagcttagttcatccaacaagctgggaatcccctctccaacgttcctgacgggtgttcctgtcttcctacgtttgtgtaatatagacatgtttgtatatgtttaggtgaggagcagagctggttttgttttgctgttgtttttctttttacagttatttatattttgtgtgatttccccctacaatatatgtggaaatacatggactacattttaaatttaaaaaccccaatatgatagttaaaaaatgtattttaagaacccacccactccccaattttataagacataaatctattataatcattcatgtttaaattgatcattcctcctgtagacaaatccatctggaaattttcttctttactcgtgatctccagcagtcacctaaatcttaagtcaagtatgaaaaaaacctcaaaaatgttgctttaaaaattgatccgtactttgcgatctacattttaaaaaataccatgcttattttaccacttcacttcaagaaaaggcctctaggtcagaggtctccaatctttttggcaccaggaccaatttcatggaagacagtttttccacagaccgggtttggagatggaggagagatggtttcgggatgattcaagcacattacatttattgtgcactttatttctattattatgacattgtaatatataatgaaataattatacaactcaccataatgtagaatcagtggaagccctgagcctgttttcctgcaactagatggtcccatctgacatgatgggaagcagtgacagatcatcagacattagattctcataaggagcacgcaacctagatccctcccatatgcagctcacagtagggtccaagctcctatgagaatctaatgctgccactgatatgacagggtgtggagctcaggtggtaatgcaagcgatggggagcgactgtaaatacagatgaagcttcatttgcttacccaccactcacctcctgctgtgtggctcggttcctaacaggccatgaactggtacctgtctgtggcccaggggttggggaccactgctctagataactcctttccaccctcttcctgcctgattgctgaaattatggagtcaccattcctactcctgcccatcatcacatgactgccccacccaactgatgaaagggataaccgacctgcaccttgaagaaaagcatcatcaaagagctctaagatgctgtggaaaaccagtatggtagttctgcaaaaaattaaacagaatggtcatacgatccgtgaattccacttctaggtatagactcaaaagaatgttaagtaccaacttaaatagatatttgtgcaccacgttcacagcagcattattcacaagagccaaaaggtgaaaactacccaaatgtccattgatggatgaatgaatgaacaaaatgtgggacgtacatacaacaaaatagtattcagccttaaaaaaggaaggaaagattctattattctatgtaataataatagaaatgatatggatgaaccttaaagacattatgctcaatgaaataagccagtcacaaaaaaccaaatatggtataactccacggacatgaggtacctagagtagtcaaattcacacagacagaaagtagaattatagtttccagggtctgagggaaggggaaaatgggaaattattttttaatggcatagaatttcagtttgggatgacgaaaaatctttggagatgggcagtggtggtggttgcacaacagtgtgaatgtacttaattaatgccactaaattgtacatttaaaaatgcttaaggtcaggcgcggtggctcacaccgtaatcctagcactttgggaggccgagacaggcagatcacttgagctcaggagttcaagaccagcctgggcaactggcgaaaccccgtctctacaaaaaatacaaaaaacttagccaggccagttggtgagcgcctgtagtcccagacatttgcgggactgagaagcccagcctcttgcgggctttagcgcaagaggtcaaggctgcagtgagcagtgatcacaccactgcactccagcctgggtgacaaagtgagaccctacctcaaaaaaaataaaaataaaaataaaaatagaaagatggtgagcatgataactcctatgttatgtgtatttgaccacaatttaaaaaagtgctaagattataatgaatatatataacatgcaataccagtagcatgcagaagagggcggatggggtttaagctttacagaaaacctcgattcaattccctcctgcagccaattctgaccgtgtcaacgaatcatccacgcacctgcagctctgctgagagagtgcaagccgtggggtaagaaccttagctttgtttgttgtaactctcattaaaaagatataagggctgcatgggtattttctaaaaaggagataatttgagctaatattgaggggagggaagtagggttatttagatttttagtatttactattttgtctagattaatgattagtgaccttggggctattgatctgaggaatttcttgcagatgcttgagagcgtgggtttcttttcactgattgcggatcaaacctggtcagctcttctattcagattgaacggtcctatgcactgtggcaagttttttctagctcttatttccccacagcgtatgttaacctctgctggatgaaacctttggctatttaaggcatatttgttgctcctttaccccgttgaaaagttctgcatttgtgttacctgtttaaaagtaggggcagatctgatggatcttgtacaatgcagttcttattccgtttccttcagaagtggacaaagagggccatatgtggttgctgtaaagaagaggatggttaacaacctgtgagcatttggtttcttgataagctttctcccagaccacctacaytgagctattaattaggaataggatgcacttcgagttttatttcaattcttgtgaacttataactttcctaagaatatatttatacatgtaggcaaagtctcttgaactttgtggcacctagcagagtgtcccacagcagctgcatgaagcttcatagacaggggcatggggtgagaaaggaggaagtggccgccatggcagctggtcagatcaatggattcaacctcagtgattcggtccttaggatgtcgttacatcttaagccacctcatttcaaggtttgaggtgccttgcatttgggtttagttaccatccagaaggaaccagacaggtctgggttcaaatctctgcttcttcagttggtcatcttgggcaagttactttacctctgggctttagctcctccatctgtaaaatatgaataataatggccgccattttgttgagtcattgagggattaaacaaggtaatggacataaaacacttagctccatgtcagacacgtaggaaatactgaaaagaagtcattcttactcttatgttgcaaagatcattcaacattcaataggttcttaatctcttttctatttctttatatcattgggaaaagataaattagatgattaaatattctttggtaaaacactagttgtcatttgatgatgtcttttgacttggacttttaaattataagatattaaagatgtattaaggaaggtcattctctgttttttacctgcttttaacgtagtagtagggatatgatattaacatatatatactatttatagactacatcaccaacatggtgaaaccccatctctactaaaaatacaaaaattagccgggtgtgatggcaggtgcctgtaatcccagctactcaggaggctgcggcaggagaatcgcttgaacctgggaggtggagcttgcagtgagctgagatcataccactttactccagcctgggcaacagagcgagactccatctcaaaaaaaaaaaaaagtgtatgtcctacttttaaaattgctttaatgaggccaagcacagtggctcacacctctaatcacacccatttgggaggctgaggtgggaagattgctggaggccaggagtttaagagcagccttggcaacatagtgagaccctgtctctatgtaaaagttgtttttataaaatgtcataatgcataagtattgcctgagagataggacctttactattgttatattaagagaagttcaaaaagagttcctctcccattgtagtcccagataagactgtggtattgggcagggggaagaagtgggtaagagatagaaactctgacttctcagcgcagagttccagctaaagcaactgggttagattctgctgcattcttaaggggccatggctctaagacctagaagcttaaagtcaattgctacaaattaagcactctatgagaggataacattaaaagcacctttgtcaacctaatgattataactgccagggtcctatcaagccataatagagcctgaggcaaaagaaacaatcagcaatactgatcctgtctttatgaaaaatttcgatattttgttcaacatagatttttgcattaattttcatttttaaaaatatttcatgtaaacattatcttgattactgagttccttgggacccccttaacatttatgccttccttgcttcacccgagtcttgacctgataactgccaccatttattaagtgtgatatgctaggcatggtactaagtgacttacatacattgtcttatgcctcttcacaagctccattttacagatgacaaaaccagatctttcagagattaaataaatggtccgagtacatagctaatgagtggatgaatggttaacattggatttgaacacagatccatcaatcactaaaaccaaacttattctttttttttttgaaactgagtcttgctctgttgcccaggctggagtgcagtggtggcatctcagctcactgcaacctccaccttttgggttcaagtgattatcctgcctcagcctcccgagtagctgggactacaggcacatgccaccacgctcagctaattttttgtatttttttagtagagacagggtttcaccatgttagccaggatggtcttgatctccttactttgtgatccacctgcctcagcctcccaaagtgctgggattacaggcctgagccaccgcgccaggcctaccaaactcattcttcaaccatcatgccctgcactgtatcaggaattcacaacataaattcattcattcaacacatatttatgagagcatattatgcatcacgttgtactaaggattaaaacgttgaaattcatacatacaaggattcattcattcatatgtgcattcaacaagcagtaatgagcaggcaccatgtgtcaagcactatgctacatgctgaggatacagaagtgaacaagacagacagctaccacgggaatgaacagagaagggacaggtgacaagcaaatgaatgaaagtttatttactaagaggtcattcagaagagatcatgaattcatggaaaattattttctgcatctagtggcatggaaattaagatattctgaattttaatgtatagttttaagaaaactgaaagaaaatataaagtttatcattatacattggatactatgaacacaataatttgagtagtaattacacttccaggccacagttgtaaactgattttctattagaaatatttaaaagtagatgtagaaaacttactcttaaatatataacagttcaaaaatccagcaggaactaagttaattaaatagaatattcacctgttttttctgayaattatcctgtgttatatttacatattaatgcagtataatattttagtatacattacactctagggagtcactgaaatgtcagcaaagaaaaatacggccggaggcatcttaagtcatttgaccacgtttttaaaagttggtgttttgagaaatcatctaaatgtggtgaccttaccaaaatgattgctttttctccaagatatttgagaacacttaccagaaacaatagtttatgaaatataaaaattatatgatcaatgtggataattaatatttttacaaaggaattctccaagtttacattgtaagggagttcacacaaagaaactatgatcatatgtgttcccaagataagagataagatgctctctctcctttactagtatcagcagctaatggaaaacttgggagtggccctctcactccctactctccataggttttctggaatttcttcacttcaagaaaaaaaccagacttgggaaggttctagagaaagagaaatacagatgagagagaggtaacattctaagtggccttatgttttgattctgccccacctttgttaccctgccatgtttgtgtgcattcctgtggatgggcgtgcccactgcctccctcacctcccatccaggctttcagaatgatgggaacatgacacgcacagagaattctctctaacccatcctctttctgttgagcatatcttttgctccctctgcttgtctatgggagtgacctgtctgagggaggttgagggtcaatgtgtaacagatacatacaaatggaagcagaaaaactcccccactaacttatcacctgctcttggtgccttcagagagcctggtgtggggacacgtagagttaaattgtttactaatttgaaattagaatctaaccacttctctccacttccattgatacattctctctggcacaagttacgctatagtgtcccaaggagtcttccctgccagccttgtggctcccagtcatttccacccaacaaacagaggaatctttttatttgtttgtttgtttatttatttatttatttattttatactgtaagttctggggtacatgtgcggaacgtgcatgtttgttacataggtatacacatgccatggtggtttgctgcacccatcagcccatcatctacattaggtatttctcctaatgctattcctcccctagccccccaccccctgacaggccccggtgtgtgtcaatgtgttctcattgttcaactcccagttatgagtgagaacatgtggtgtttggttttctgttcttgtattagtttgctgagaatgatggtttccagattcatccatgtccctgcaaaggacatgaacacattcttttttatggctgcatagtattccatggtgtatatgtgccatattttctttatccagtctatcattgatgggcatttgggttggttccaagtctttgctgttgtgaatagtgctgcaataaacacgtgtgtgcatgtatctttatagtagaatgatttataatcctttggatagatacccagtaatggcattgcaggatcaaatagtatttctagttctagatccttgaggaatcgccacattgtcttccacaattgttgagctaatttacacccccaccaacagtgtaaaagcgttcctatttctctacaccctctccagcacctgttgtctcctgactttttaatgatcaccattctaacaggcatgagatggtatctcattgtggttttgatttgcatttctctaatgaccagtgatcatgagctttttttcatatgtttgttggctgcataaatgtcttcttttgagaagtgcctgttcatatccttcacccactttttgatggggttgtttttttcttgtaaattttttaatgttctttatagattctgggtattagccctttgtcagatggacagattgcaaaaattttctcccattctataggttgcctcaaacagaggaatctttaaaatgtatgtcagaacctgtcattcctggactctaaatcttctgctggtttcttatttcagtcagaggaaaattgccaagttcttataagatccgacctcttctctgattccgtcccctaactccactccaggtcttcctcacattttccaagcacatcaggatctttaaatttgtacttgctgttctctctctctccaaaatactctttccccagacaacaagtgtcttgcttctttggcccctttagatttctgcatgaagatcactatcagggaggccatttttgatcattctataaaaaagaaaatcactccccagtctctctctgtttcccttatcttagttatttttccttcaagacaatatcactgcctgatattggtccccacccaaatctcatcttgaactgtagctcccataattcccacatgttgtgggagggacctggtgggaagtaattgaatcatgggggcgggtctttcccatgctgttctcatgatagtgaataagtctcatgnnnnnnnnnnnnnnnnnnnnnnnnnnnnnnnnnnnnnnnnnnnnnnnnnnnnnnnnnnnnnnnnnnnnnnnnnnnnnnnnnnnnnnnnnnnngaatcctgtggttttataaagaggaggttccctgcacatgctctcttgcctgctgccacataagacatgactttgctcctcattcgccttccaccatgattgtgaggcctccccaggcatgtggaattgtgagtcataacatataaacgtattgttttgtttgcagtctctcttttcttaacttctttctagaatataagctatgtagaaacagaaatctcttctgttcactgctacttccccagtgcctagaaaagtttctggcagaataggtacttaataaatatcttgaataatgaatatcgtaaaatcttagtactccaactacctctgttctacgtctaatccaaccacgtgaagcctggcacatctcccaaagtcctcagaattctatatccttcaatttcctcatctatcaaatgggagtagtagtacttccctcacagagtatggtgataaataaatgagataatatacatgaagcaattagtatgtatcttggcacattgaaatctaacctgaaagctttgattctatgccataacagaattcagcagctgaatatcaagacctttgaattcaacaagaagttaagacatttatagttgtctaacaacagactgaagattgtggcttggtattcactggcaggtttcagacatttagatctttcttttaatgactaacaccatgcctatctgtggagaagctggcaacatgtcacacctggaaattgtttttcaacattaatactattatttggcagtaatccagattgcttttgccaccaacctgaagacatatagaggcagaaggacaggaataattctatttgtttcctgttttgaaacttccatctgtaaggtaagtgttgaaagtcagatattggctccagggactttctatatccacaaatacaaaaattgaggggtaactccttgatatcaagtcaaaggctcacaatgtctggtaataaaacaaattactttcaattttcttgaaatcttcaggctatcaaaaggagatgtgagagagggtmttgagtctggcctgacaatgcagttcttaaaccaaaggtccattatgcttctcctctctgagaatcctgacttacctcaacaacggagacatggcacagtagccagcttggagacttctcagccaatgctctgagatcaagtcgaagacccaatatacaggttggaaccttactccaacctcttgatgaatgtagtcagatgttggcattttttttgcaaataaaaatcctacaggatttaacaaaccaaataaaaatctaatattatatacttttttttagggttttgagctcatcttcatcattcatatgaggaaataagtggtaaaatccttggaaatacaatgagactcatcagaaacatttacatattttgtagtattgttatgacagcagagggtgatgctccagagctgccagaagaaagggaactgatgaccaactgctccaacatgtctctaagaaaggttcccgcagacttgaccccagccacaacracactggatttatcctataacctcctttttcaactccagagttcagattttcattctgtctccaaactgagagttttgattctatgccataacagaattcaacagctggatctcaaracctttgaattcaacaaggagttaagatatttagatttgtctaataacagactgaagagtgtaacttggtatttactggcaggtctcaggtatttagatctttcttttaatgactttgacaccatgcctatctgtgaggaagctggcaacatgtcacacctggaaatcctaggtttgagtggggcaaaaatacaaaaatcagatttccagaaaattkctcatctgcatctaaatactgtcttcttaggattcagaactcttcctcattatgaagaaggtagcctgcccatcttaaacacaacaaaactgcacattgttttaccaatggacacaaatttctgggttcttttgcgtgatggaatcaagacttcaaaaatattagaaatgacaaatatagatggcaaaagccaatttgtaagttatgaaatgcaacgaaatcttagtttagaamatgctaagacatcggttctattgcttaataaagttgatttactctgggacgaccttttccttatcttacaatttgtttggcatacatcagtggaacactttcagatccgaaatgtgacttttggtggtaaggcttatcttgaccacaattcatttgactactcaaatactrtaatgagaactataaarttggagcatgtacatttcagagtgttttacattcaacaggataaaatctatttgcttttgaccaaaayggacatagaaaacctgacaatatcaaatgcacaaatgccacacatgcttttccckaattatcctacgaaattccaatatttaaattttgccaataatatcttaacagacgagttgtttaaaagaactmtcyaactgcctcacttgaaaactctcattttgaatgrcaataaactggagacactttctttagtaagttgctttgctaacaacacacccttggaacacttggatctgagtcaaaatctattacaacataaaaatgatgaaaattgctcatggccagaaactgtggtcaatatgaatcygtcatacaataaattgtctgattctgtcttcaggtgcttgcccaaaagtattcaaatacttgacctaaataataaccaaatccaaactgtacctaaagagactattcatctgatggccttacgagaactaaataytgcatttaattttctaactgatctccctggatgcagtcatttcagtagactttcagttctgaacattgaaatgaacttcattctcagcccatctctggattttgttcagagctgccaggaagttaaaactctaaatgcgggaagaaatccattccggtgtacctgtgaattaaaaaatttcattcagcttgaaacatattcagaggtcatgatggttggatggtcagattcatacacctgtgaataccctttaaacctaaggggaactaggttaaaagacgttcatctccacgaattatcttgcaacacagctctgttgattgtcaccattgtggttattatgctagttctggggttggctgtggccttctgctgtctccactttgatctgccctggtatctcaggatgctaggtcaatgcacacaaacatggcacagggttaggaaaacaacccaagaacaactcaagagaaatgtccgattccacgcatttatttcatacagtgaacatgattctctgtgggtgaagaatgaattgatccccaatctagagaaggaagatggttctatcttgatttgcctttatgaaagctactttgaccctggcaaaagcattagtgaaaatattgtaagcttcattgagaaaagctataagtccatctttgttttgtctcccaactttgtccagaatgagtggtgccattatgaattctactttgcccaccacaatctcttccatgaaaattctgatcayataattcttatcttactggaacccattccattctattgcattcccaccaggtatcataaactgaaagctctcctggaaaaaaaagcatacttggaatggcccaaggataggcgtaaatgtgggcttttctgggcaaaccttcgagctgctrttaatgttaatgtattagccaccagagaaatgtatgaactgcagacattcacagagttaaatgaagagtctcraggttctacaatctctctgatgagaacagaytgtctataaaatcccacagtccttgggaagttggggaccacatacactgttgggatgtacattgatacaacctttatgatggcaatttgacaatatttattaaaataaaaaatggttattcccttcatatcagtttctagaaggatttctaagaatgtatcctatagaaacaccttcacaagtttataagggcttatggaaaaaggtgttcatcccaggattgtttataatcatgaaaaatgtggccaggtgcagtggctcactcttgtaatcccagcactatgggaggccaaggtgggtgacccacgaggtcaagagatggagaccatcctggccaacatggtgaaaccctgtctctactaaaaatacaaaaattagctgggcgtgatggtgcacgcctgtagtcccagctacttgggaggctgaggcaggagaatcgcttgaacccgggaggtggcagttgcagtgagctgagatcgagccactgcactccagcctggtgacagagcgagactccatctcaaaaaaaagaaaaaaaaaaaagaaaaaaatggaaaacatcctcatggccacaaaataaggtctaattcrataaattatagtacattaatgtaatataatattacatgccamtaaaaagaataaggtagctgtatatttcctggtatggaaaaaacatattaatatgttataaactattaggttggtgcaaaactaattgtggtttttgccattgaaatggcattgaaataaaagtgtaaagaaatctataccagatgtagtaacagtggtttgggtctgggaggttggattacagggagcatttgatttctatgttgtgtatttctataatgtttgaattgtttagaatgaatctgtatttcttttataagtagaaaaaaaataaagatagtttttacagcctacacatcctactcatttggcttgattcttctttctggtctcacaggtcacaggaagaaaagcactcctgaaatataatttttgcaaaattatatttcaaaaatgacaattttgcaaaattatatttcaaaaacaaacatcatgtcacttctctggttagaaaaaaattttgtggcttaaacacatgattcagggagagaatgtcatgctcctttaagatctgacagcaatctccttttatatccttgcatcttctttatttttaatttttagagactagctcttgctctgtcacccaggctggaatgcagtggtgcgatcatagctcactgcagtattgagctcctggcctcaaatgatcctcctgtcttggactcccgaagtgctgggattacaggtgtgagccaccacacccagcccctccttgcatcctatcattgggccctatggagctactggcccttccccagaactttcagtgttctttcatggctccagagcccagatttcacatcatgcctgctgtaatgccttccctacttgggtttgttcaggaaatcttacagttctctcaggacacaatccacatatcgactcttctttgaaatcatcctcactctttcccgtaagcatgatgcttcttgattctcttccacactttggacatatttctatcaccaacctaattatgtacatttttaaagtttcaatttcccactagactatgaactcctcaaaggctaagacagacttacatctgcccttgtgtctgcagcagtccctggttcagaactggtgctcaaagaatgtttatggaatggatgttgggttggctagaggagcttagtgggaactcaactggcttaaggatagatggtggaatttaaaggcatattctgagaagctcaggaagagcaggaataggtaaaactcaggtaagaagacagagaatccagaattgtaggattcctaagtagagctcacgtcatgtgaaattgccaaaatttggttgctctcgacctagaaaagcatctacttttaaaaatctcattccatctgtattagggttctctagagggacagaactaataggatatatatatatatatatatatcacacaatactatatctatatctatatctatatctatatatatatattgcaaggtctattgtgggaccttgtaattgtgtgggtcaacactccttaataaactcctatatatataggaggtacatatatatataaaataggatattacatataggatatatatataaaataggatatatatataaaataggatatatatataataggatatatataggagctatataggatatatatacaaatatatataaagtatatataaatatatatactttatatatataataggatattatatatatataggatatatataataggatattatatatatataggatatatataataggatattatatatataggatatatataataggagatatatatataataggagatatatatatataataggagatatatatatatatgagcttattaaggagtattgacacacacaattacaaggtcccacggtagaccatctgcaagctgaggagcaaggaagccagtccaagtcccaaagctgaagaacttggagtgcaatgtttgagggcaggaagcatccagcatgggtgaaagatgtaggctgggaggctagcccagtcaagtttcgtcatgttcttctgcctccttttattctagctatgctggcagctgattagatggtgccctcccagattaagggtgggtctgcctttcccattccactgactcaaatgttaatctccttggcaacatcctcacagacacacccaggaacaatactttgcatccttcaatccaatcaagttgacactcaatattagccatcacaccatctactaagactaatctcctaaacaagttaaaaccggattctgcatctaattcattttcttatagtttgtatcttatgaattcctcatgctagtgattattttaaaaattgtactcaagaaggccaacccgagagtacagggagggcactgggtgtcaatctagaagccaggccatgctaccatttagccagtagctggagttgaggagctagagtctagcagcttgggggctgagcatctctctttctcttccctggtgagcccatggtctgtctggcagaaggggaaacccaaggaaaccacagtggaatggagacaaagcatggggaaggtgccttcctgggcaggacactgatgtaaatgtgattcttggcttctggaggagtgagaccgattctgcacaagggttggtaaatcttgagtaaattattcagaatgagactttcacctttaattagttaatgaattcacctttaattatttaatgaattcacctttgattaattaatccagctttaattcacatttaattaattaacttggaacacacgaagaatgtaagattagccctaaagtcaccaggatttagttatttcatgctagaaccctcagtttagcaataccatttacaaaacagatgtgttttattacaagtttaaaaataacacattaggctgagctctcagcaacttcacagctggacaatccttaaatcttacctatcaaatcattttgctgttcctgtctcagaaacttaaataccatccaacatttcctaatatgcttggttttgactgttatgaattacaatcagaaaaaataaattttacatgagttgaacgttatttgcttttgaggcttgaaatacaagtaacacctagcctcatacaaacctgatgatatacttttacccaagaaatttcagatttcaacaaagacccactgttctgaatcatgacattgatgcggaagtgagcatacccaggctgaatgctgtaacagcagccggtgtcatgaactccgatcatgttttaaaaatgactctggagcttgtaagttcctttttatttccttgccatttgtcaacctggagcttgtttcatttttttccccgaggaaactgaactcttaagtgaagtctgtctgtgtattcctcagggggctttcacaatctcttagcatctctacagataaattgcaatcctttctggacgtcaacagttgagttgttgagaatggtctgtattctctcagcaaatgtggcaaagagagctgtactgaaatggaattgcagtccttgaattcccaacagattagtgggaagaaggaattttacatctaaattttggcaaatgttccccaaagttcactcctttatctattatgatgaaccattcaagagaagcatagactaggcatattaaaagtgggtgagaatttggagattgtcaagtataactctcactttcaaatggggaaattgaggctttagaattttaaatggcccacccaagcccaaggtcatagtcttttaactcctaatgtttttccttccaatccacaaccaagtggcctttactttttgcatttgatttttattctctcattccttctattgcaattctcaagaacagagccctggatggggcactttgattatcccgtctatattccccaaagtcatttgaggtctaggctttctctgcagtcttcctccatggccaaagcatcctgtatttgccacctgattctatccccgaaaaaaacattcttttgccatcggtaacttgcaatgggggctgctcctcagatcagccacccctggtctaggagccagaaaatgttctctatgtaaaggatggggaataatggggagcctgttctcccctggaggtttcaaaggcaacttaatcaccagcatcctgctggggatacataccttggtccctgagctcaattttccacctggtgtgctgtgacccatgacttgctgctgccattgatccttttaaccctggacagggctccttgaggacccacttgagatagggagtgggtctggtagtgcatcctgaagtcctgccaggggacaagcacaatgaaaaactcctgactgtgggtctggaagtygcctacacctgtacatctattcaacagccagctgctgagacactgccctccttcacagatgggggctctgagctgctggacaacactgcgttctggatgttcaaggacaaagttgcagccaacagtaggggtgttcaggattatggttagggaagctgggtgggggatcctggctagcacaactcccgacagcagcccatgtctgcctcttcacaatgagattcttgtcttcagaatctgtcttgttagtggtgtccaagcagcctcaagggtaactattaatactctaacaacacatgcacattctagtcattattttgaaatacttaatgaaaagccagtggagtgaactctaaatcaattcacattttccccaagacgtttatttcagtattctttttgcccttcaaatctttgctccaatcccatttccgttgaagacttcctggatgacctagtagaaaatggcagcactctttgtccaccttccttgctttttatttctccatagcatttgccatcttctaagtttacttctaagttttctctttatcctgctgattccctgtcttcccccactagaatgcaaactcttttagagcagaaatttttttctgttttgctcacagatattgtctctatctctgcctagaacagtgcctggcacaggtccactccccagggattttctttctgtgttgattttattttctttgttgattggcctcctctgctcctctgaagtccagcagggcctctgttgccaaggctgcccccttcagtgtcagcgcttattgttggaaatcaaggatacagattttacttgtaagggggtgtattagtccattttcatgttgctgataaagacatacccaagactgggtaatttataaagaaaaagaggtttaatggactcactgttccatgtgcctggggagggctcacaatcatggcagaaggtgaaaggcacattttacatggtggcagacaagagcaaatgagagccaagcaaaaagggaaaccccgtataaaaccatcagatcttgtgagacttactcactaccatgagaacagtatgggagaaactgcccccatgattcaatcatctcctactgggtctctcccacaacatgtgggaattataggagctacaattcaagatgagatttgggtggggacacagccaaatcatatcgggggcatccctcaccatctgtatttttgctgacactttctaggacctgccatcactggcttattgcttcccccaaccaccccacacttcatgaatcttctctttgcctcctcctattggaagctgctggatctcaggtgcttgctgtgggcagccctttaactattttggagtctgcagattatatgaatcactgcaaatggggtacctggttcccccacccccaaccacttcccctgttcttttgctgtctcagcctttttagaggggaaggggcagcactgggccaatgaagcccctgccgtgagcccacgcctcagatctcccctt

SEQ ID NO: 8700 - DNA, 13920 bp, Homo sapiens
ttaccctaattagggccatcagatccagtgccccctttctgggacccttcctcaggtatttaaagtcatttatcttcagagatgacagcccccttcttttatttatttattgagagatggggatatgttatgttacccaggctagtcttgaactcctgggttcaagcgatcctcctgcttcagtctcccaaatagctgggactacaggcatgcaccccagtgtctggctaatttttcgtttatattttgtagagttgaggtttcactatgttgcctaggctggtctcgaacacctgagctcaagcaatcctcctgcctcagcctcccaaagtactgggattacagatgtgagccacatcgcccagcctatgaatatatatatatatatatatatatatatatatatatatatatatatatttttttttttttttttttttttttttttgagacggagtttcactcttgttgcccagtctggcgtgcaatggtgcgatctccacttaccacaacctctgcctcccaggttcaagagattcttgtgcctcagcctcccgagcagctgggattacagtcatgtgccaccacgcccagctggttttgtatttttagtagagatggggtttctctatgttggtcaggctggtcccaaactcccgacctcaggtgatctgcccaccttggcctcccaaagtgctgggattacaagcgtgagccctggccctcatatttcttaccttagggaaatcttgtattactataatatatatatatataaagttccttaaagtcccttattaaagagggtgaccataacaaaacatttaaataaaatgagaaatgttccttcttgtatcatggctggtggtcctacacttggggagaggccgctctggccaacacgctacttctcagatggagaaaccgaggccaagagagggacagggtctgtgctggagccatcaggggttctaagagcctcacactgctgtgggtcacctcccacccaccctccagcctcctccacacatgctgtttctgcccctgccaggttcccacttctactgcttccctcttcctctttctaattttttttttttttttaaagagtccgggtcttgccatgttgcccaggctggacttgaactcctgggctcaagcaatcctcccacctcggcctcccaaagtgctgggattacatgtgtgagccattgcacctggctctttctctttttacctaaccactccctttctttttttttttttttttgagacggagtctcactctgtcacccaggctggagtgcagtggtgcgatctcggctcactgcaacctctgcctcccaggttcaagcgattctcctgcttcagcctcccgagtagctgggactacaggtgcgtgccaccacgcccagctaatttttgtatttgtagtagagatgggctcccatttcgggagctaagtggccctgtgatggtgtctgctcacttatccttgcaaggcatcagctcttccctcgtaaaacagggttggtaatccctgccttaacaatttccctgtatagagcataaagattaggagttttggttgggtgaggtggctcatgctggtcatcccagcactttgggaggccgaggtgggcgaatcacttgagattaagagtttgagactagcccagccaacatggtgaaaccccgcctccactaaaaatataaaaattagccaggcatggtggtgtgcatctgtaatcccagctactcgggaggctgaggcaggagaattgcttgaacctggggggcggaggttgtagtgagccaagatcatgccactgcactccagcctgggtgacaaagagagactgtgtctgaaaacaaaacaaacaacaacaacagcaacaaaacattgggtgttttggcccagtgcggtggctcatgcctgtaatcccagcactttgggaggccgaggtgggtaaaacacttggggtcaggagttggtgaccagcctggctgacatggtgaaatcccgtctttactaaaaaaacaaaaactagctgggtgtggtgatgggtgcctataatcccagctactcaggaggctgaggcatgagaattgcttgaacccgggaggttgaggctccagtgagctgagatcaggccattccactgcagcctgggtgacaaagtgaaactcttctcaaaaaaaaaaaaaaattggatattttgtgttttttaaggccttggaaaagcccttaatgggtattactaatctggggtgaagcaccccaccccacacactcccacccaatgaccttctgctcgcccactcctgttgcaacatggggatggcaggcatccccgccctatttaccccagcctcactcttctcctgagtgctgcctctgtctgaccatcctttctccccscarcttcctcctccccacacaccacactcccggcacccactgagtgagaaaatgcaggcagtcaaccggcatcccctctgaatcactggggagcaaaaattagaagagctgtcataagacatcatgatgagctgggcacagtggctcatgcctgtaatcccagcgctttgggaggtcgaggtgggaggattgcttgaagccaggagttggaaactagcctgggcaacataggggtaccccatctctactaaaaatttaaaaaattagctgggcatggtggcgtgcacctgtagtcccagctactcaggatgctgaggcaggaggatcgcctgagtccaggagttggaagctgcaatgagctatgatcacaccactgcactccagcctgggcaacagagtgagaccttgtctcaaattttttttttttttttttggccaggtgcagtggctcacacctgtaatcccagcacgttggggggccgaggtgggtggattacctgaggtcaggagttcaagaccagcctgaccaacctagtgaaatcccgtctctactaaaaatacaacaattagcaagacacgatggtgggtgcctgtaatctcagctactggggaggctgaggcgggagaatcgcttgaacctcggaggtggaggttgcagtgagccaagatcgcgccactgcactccagcctgggcgacagagagagactccgtatcaaaaataataaataaataaataaataaaattttaaagaaaaaaacctctgcatgtataaagggccttcccatgacttttctcacttaatcctccctaattgctctgccagcagaggataattactgttggctgatggggaggtgaaggcagacaggggcaggtgccaggctaatgaagccctgagttgggctctcagcatttttcactctgtaagcataggcagtgagatcaggtgctaccagcctccccgacttcagtcttgcctccatcaggggacccgccttgctgacttaccttgtgtacacgcaggctccagttgtgctctgtgggcaaaacccacacaggagtccctggtccagaggaagttgtttcagagttgatccatcatctattcattctgcaaatgctggccatggcacaggtgatttgctcggcacttggcgggtatataaatttatctcaaggcgttcaggtcaagcatgagactgagacgcagacacccagctggccaccaagtgacgagtaccactgtgctcccactatgccactgtgtgggtcttacatcggtgtgtgccctggaatcccagagcagggaggttggagaaggcaaatggagagaaccgtagggaggggttgggtatgggagtgttggagacagcacaaatctttcttatggttaggcataattgaagcctgtcagtagcaatatgaacctgtgatcaattaagcagctgaccaattgttacctcctcctccttgttcttgttacccaataattacaaagggctgtagagcctccgtggcagtcagccacatgggagtggcaggtgaagggagtctctgatcatgaggtcctgacctgggatcctggaatcgggggtggagtgaggtgggagccatgtcccactctgcctcataaagttgcctcagtcccttacaactgaactggacgttatgacttacaggcttccgcgtagttgccagtgccttctgtcctccaacctcagtgcagctgtcagctatgagtccctcctgaactttcctcctggcacaattggccagttttcccgtggtttttttgttttctttttattttttttttaaagacggggttttgctatgttgagcaggctggtcttgaactcctgggctcaaataatcctcccaccttagcctcccaaagtgctgggatgacaggcatgagccacctcacccagcctttctttttttttttttttaagagacaggattatgctctgtcacccaggctggagttcagtggtgctcacctagctcactgtagcctcaaactcctaggctcaagtgatcctgccccctcagcctcccaagtagctaggactacaggcgcataccaccgtgcctggctaatttttctatttcttttggagacagggtcttgctatgttgcccctgctggtctcaaactcctggcctcagtcaatcctcccgcctcagcctcctaaagcattgggattacaggcatgagccaccgctcccggcccctggtttctcctatgtttcccttcctcccacccaccacccccataccttgtcctgggtcagggtccccaaagcagacccttggcagggattcatgggcttgtggtttattaagagatgcttccacgagagaccatcgggggactgggaatctggtcggcgcgggaaggggccaagcaaagtccggctgcacagagagtcacagatttgaccgagttggaaactcaggaaacagggtaggtcatgctggatctggagtcggcatccctctggcagacattggccacctcagaggatgtgaatttccaggcatttcccacttccctagaatcttggtgactaagtggctccggcaacttgagggtacaggcgatggctgttgggacttcaaggccaccgagagctgatggaaagcggtcctgacagcatctgctttgctctgtcaagacttgtcatggactgattgattgattggttgattgattgattttaagacagggtgttgctctgttgcccagcctggagaggcagtggtgtgatcacagctcactgcagccttgaactcctgggttcaagtcatccttccacctcagcctccccaagagctgagactacaagcctgcaccaccacgcctggctaatttttttattttttatagagatagggtcttgctttgttgcctaggctggtctcaaagtcctggcctcaaatgatcctcccacttgaaacttccaaagcacagggattacaagcatgagcccccgtgcccagctgacctctcattgtctgttacacacacttgatcacaaatctgtctccccattagagtcctcccagtgcctggcacagaccacatgcctaataaataattgggtgaatgaatgaatgaatgaatggaagggagaagatagggatgactctgcccattttcagctgaagtaactgaggctcagggaggtgagtgacttatccaggatcccacagggagtggccaacacagccaggatcccatgggccttctgacaatgcatccaacacctttgaacttggcctaggtggggtgatgtcccctcccccagttctttcgttcggagcccaagataacccttgactcagctgggcaacaacgggacaacaacttcctctttccagaccacaggcctcaggattttcaaggaagcgtggagggggctcgggggcgtgtttccttctagttgccccataaagggcagagggagggagtttggggtactctgcaaggacccgagctatttatccctaggtcctttcctcctgcacgtcagctttgagccccgagctggtgcttctgctctctgagacatggcaggcctgatgaccatagtaaccagccttctgttccttggtgtctgtgcccaccacatcatccctacgggtaagacctccgacaggatgcagttccaagggcatggctgggatggcacagtggggggtgcaggactgaccagcctggggctggagggaagcgctggggaaagggyggcccagtgaatggactggcggtgtttggtgcagggttcaagctccagctctgaggcccagagccaaggggaggctgggaaaagacgtggctcttytctctctcctcttctaggctctgtggtcmtcccctytccctgctgcatgttctttgtttccaagagaattcctgagaaccgagtggtcrgctaccagctgtccagcaggagcacatgcctcaaggcaggagtgatgtaggtatccttcatgggcacgtggcaggagaggggygggggcaggtgcaactccagggtccctgagaagcaaggtcagccagccccagctctgtgcatccctggagaagtcacctcccctctctggtcctcaacttccttgcccataaaactaggaggaggatatatttatttttttaatttcatttttctttttaggagatagggtcttgctctgtcacccaagctggagtgcagtggcacgatcatagctcattgcattgcagcctcaacctcctgggctcaagtgatcctcccatctcagcctcccaaagtggtgctaggattacggccatgaaccaccacacccagccaggaggaggattttttttttttcccctgagacagagtctctatcacccaagctggagtgcagtggtacgatcttggctcactgcaacctccgcctcccaggttcaagcaattctcatgcctcagcctcccgagtagctgggattacaggtacgcaccaccatgcccggctaatttttgtatttttaggagagacagggtttcaccatgttgaccaggctggtctcgaacttctgacctgaagtgatctgcccatctcagccttccaaagtgctgggattacaggcgtgatccaccaggagaaggatttagattcaatatctactgagcaccaaatatataacaagtcactattcaggggcacaagacaatatcttatctaattctctcaacaattctatggggtagcgatgattgttcccattttacagaggacagmtgaggctcaggaaggtaacttgctcaaggtcacgtgggctgacatgtgtctgtcctccaaatagcttcataagtagtaactgtgaactcattttgtaaacagaggcatgaaatagaaatacaataagaaggccacgtgcagtggcttacatctgcaatctcagtgctttgggaggctgaggcaggarggttgcttaaggccaggagtttaagaccagcctaggcaacatagtgagactccgtttctgcaaaaaaataaaaaaaattagctgggcatggtggcatgttcctgtagtcccagctactcaggaggctaaggcgggaggacagcttgagcctgggaatttgaggctgcagtgagttatgatcgccactttattgcagcctggacaacagagtgagaccctgtgtcaaaaaatgaagatgacatcatctcagcaacttgcaaggaagccttactgtctctgggcgtccacatcccccccgccatgaagtggagtggcccaaggtccctgtcgacctcagctgatcccctgtccctttcttccacagcttcaccaccaagaagggccagcagttctgtggcgaccccaagcaggagtgggtccagaggtacatgaagaacctggacgccaagcagaagaaggcttcccctagggccagggcagtggctgtcaagggccctgtccagagatatcctggcaaccaaaccacctgctaatcmccrcccagccctccagccctgagtttgggcctgagctgcttggcgggctactcggggcctggagaagccacagtgatggggggaagagctaattttcctgtttcttagcaacactctccagggatgtgtctcttctatgaaaaacccgagggagcaggtgatgtggttcccgggggctgagcaatggctccaagcatccaaggccccttgcctttctggagctgggtgagaagatcccagaaggagagcagtggcaactctttgccttctcctcctgacctggttctgatgctttttcttttttttttttttctgagacggagtctcgctctgtcacccaggctggagtgcagtggcacaatctcggttcactgcaacctccgcctcctgggttcaagtgattctcgtgcctcagcctcccgagtacctgggactacaggtgtgtaccaccacacccaactaacttttgtatttttagtagagatgaggtttcaccatgttggccaggctggtctcaaactcctggcctcaagtgatctacctgcctcggcctcccaaagtgctgggattacaggcatgagccaccacacccagcctactcaaacttttatgttgaaaaaaaaaaatcataatttttttttttttaaaggaaatgaacgtggaggactggggtgaagggccagcctgggtagtttaatctttttgggaagacatgactttaaggagattccctgctttgtgacaggttgctccatgctgtcttggggacaagggcctgtactgccttcaaatctgggctcaccccacattttggtgaggggaagatagggtggggggattagggggagaaaagactctagctttttttttctatgcatgatatactgtgtgggtttatcaagagtgtagacacagttgctgttctcaaataataggccaaataaaatgcgattctttttttctttgaaggttgttgtgtcttgtgtgttctttttttttttttcttttcgttttgaaatggagtctcgctcttgtcgccccaggctggagtgcaatgggacgatctcagctcactgcaacctctgcctcccaggttcaagcaattcttctgcctcagcctcctgaacagctggggctacaggtatctgccatcatgccctgctaatttttttatatttttagtagacacagagtttcaccgtgttggtcaggctggtctcaaactcctgacctcaggtgatccacccgcctcagcctcccaaagtgccgggattccaggtgtgagccactgcgcccggcattttgtgtttttgactctcctggagggggtagggttgggctgtgaccaatggtgtacgtgccccagaaagcatcccaggctgcctctccaaggttggaggggaagaagacagccggagcccaaagcatctgggagtgaccttgccctgccgctgggagtcctgttattgactttgaaaaacacacatgcacagctaggttcaattaaataatttaaaaaatttttgagacagggtatcactctgttgcccagactggagtacagtggtacaatcatagctcactgcagccacgaaattctgggctcaagcaatcctcccacctcagcttctctaagtagctgggactacaggtgtgcaccaccacacccggctaatcttttcattttttgtagagatgagatcttgctttgttgtccaggctggtctagaactcctggcctcaagcagttctcccacctcggcttcccaaaacaccagaattaaagatgtgagccattgcaccaggccccaaacaaaaattttttttttttgagatggagtttctttcttgttgcccaggctggagtacaatggcatgatctcggctcactgcaacttccacctcccggattcaagcgattctactgtcttggcctcccaagtagctgggattaaggcacacaccaccacgcctggctaattttgtatttttagtagagatggggtttcaccatggtggtcaggctggtctcgaacgcctgacctcaagtgatccacctgcctcagcctcccaaagtgctggaattacaaggattacaggcatgagccactctgcctggccccaaatttttaaaatatttcaacaaacatgttattgcacaaggagttattatgggtattaggaggctaaaaaaatgatacacgatgatgtcttgcttcaaagaattagaattataacatgaacacactcgtgaatcaagagcactatgggttcaaagccaattctgctttacaagttgcatgaccttgaaagagaaaaactctttttctatgctcgcgacagttttgacaccaaatatgtaagttttccacaccatgcagctttccaattctctggctgagtgcagtggcccatgcctgtaatctcagcactttaagaggccaaggtgggaggatcttgtgagcccagcagttcaagaccagcctgggtaacatagggagatcctttctctacaaaataataataataataataataataataataaatttatttattttgagacggagtcttgctctgtctcccaggctggagtgtagcggtatgatctcagctcactgcaacctccacctcccaggttcaaccaattctcctgcctcagcctcccaagtagcaaggactacaggcacatgccactgcatccagctaatttttgtatttttagtagagatgggtttcaccatgttggccaggctggtctcaaactcctgacctcaagtgatctgcccgccttggcctcccaaagtgctgggattacaggtgtgagccgctgcgcccagcctacaaaaaattaaaaaggtagctggatgtggtggtggtgcaagctactttggaggctgagatgggaggattgcttgagcccaggaggttgaggctgcagtgagctgtgatcacgccactgcactccagcctgggcaacagagcgggactttgtctccaaaaaaaaaaaaagaaaagaaaaaaaatgggtgcatgatcagaggggcatggatggtggctcacgcctgtaatcccagcactttgggaggctgagacaggcacattgcttgagcccaggagtttgagaccagcctggggaatatggaaaatctcatctccacaaaaataaaaataaaattaaaaattaaaaaaagtgcatgatttagcagaggacaatcagagctcaaaccactgggaagtggcatgagaccctgtcatggagaaaactcgcaattgtctagaagaatgttctcccaagctgggaaagagccgagaccaaagaactcagagaagtccagcctggcgagtaggtgagtgtgtgaggatttacatatagggactcctagctagcagcaggaccactgcagagatccaccccgctacccatctctatgctgctttgaagctaattttctggctctttgcctattgtatgcaatgagactgtctgccttggctatgttcccggatatgctctgggacttttgggttctccgcgacacctgccccttggctcagcaccatggcctgggaggtgaggtttaagcagcagacatataagggktcccaatccagacctcaagagagggttcttggatctcacacaagaaggaattcagggtgagtccatagagtaaagtgaaagcaagtttattaagaaagtaaaggaacaaaagaatggctactccatagacagagcagccctgagggatgctggttgcccattttttatgtttttttcttgatgatatgctaagcaaggggtggattattcatgcctaccctttttagaccatataaggtaacttcctgatgttgccatggtgtttgtaaactgtcctggcgctggtgggagagtagcagtgaggacgaccagaggtcactctcattgccatcttggttttggttggttttagccagtttctttaccacaacctgttttatcagcgaggtctttatgaccggcatattgcgccgacctcctatctcatcctgtgatttagaatgccttaaccatctaggaatgcacccagtaggtctcagccttgttttacctagcccatatttaagatggagttgctctggttcacacgcttctgacacatatactttttttttttttgcactccagactagagcacagtggggcaatctcggctcactgcagcctccgcctcccaggttcaagctattctctgcctcagcctcctgtgtagctgggattagaggcatgcgccacaacacctgactaatttttgtatttttagtagagacagcgtttcattatgttggccaggctggtctcaaactcctagcctcaagtgatctgcccacctcagcttcccaaagtgctgggattacaggcatgagccaccatgtgtggccaacatatacccttaaataacctggtggggatccatcaacctacagatccatcctcctcggaagtacacacccactccatcagtctttgccagctgtgcgtgaggggtgggctttcagcaagtgggagcagagtaagttcccatggttaaaaaaaagcccccaggcacagggagccacatactggcagccaggagtctgcagagcacacagaggcccagtagtaggcactgcatatacagtagctactaaagctattgtaagtctaatgcaaagcagaataagtagcaatgctaaacaatacacagcaggggacattctgatgggaagaaggagcctgcagaaccagcttcacagagttggcacctgaatggtgacttgggttccaccctggagagagagcatgttcctaaagagggaggagagccagagcattcagggatgagactgaaatacagacagtgtcccaactgcatgtgacaataggactctcaccacagcctctgcagcattcagcctggagagccggtgcttggtccatagtgtaaccatccagtgcattcattttgcccactgcccagataaagccaatttatcaagacaggggaattgcaacagagaaggaatttaattcatgcagagctggctgtacaggagaccggagcgttattgttactcaaaccagccttccccaaagttcagagactagggtttttcaagaatagtttggtaggcagtgggctagggaatgggagctgctgattggttggggatgcaatcatacaggtgtggaaaatggtccttttacattgagtctgcttctgggtagagccacagaggagtcactggtctgggtggactcatccaacagtcagaaatgcaaaagtctgaaaacacatcttttttttttttttttttttttttggacatgtcttgctctgtccccgaggctggagtgcagtggcacaatcttggctcactgcaagctccgcctcctgggttcacaccattctcctgcctcagcctcctgagtagctaggaatacaggcacctgccatcacgcctggctaattttttgtattttttagtagagacgggttttcactgtgttagccaggatgatctcgatctcctgacctcatgatccacctgcctcggtctcccaaagtgctggaattacaggtgtgagccaccgtgcccggcctgaaaacacatcttcaaaggcctatcataggccaggggcagtgtctgtcacctataatgccagcactttgggaggctgaggcgggcagatcacttgaggtcaggggttcaagaccagcctggccaacatggtgaaacccagtctctactaaaaatacaaaaattagccaggcgtggcagcatgcagctgtaatcccagctactcaggaggctgagacataagaattcatttgaacccagaagtcagaggttgcagtgagctgagatcatgccactgcactccagcctaggtgacagagtgagaccctgtctcaaaaaaaaaaaacaaaaacaaaccaaaaaaagtctatcacaggttctgcaatagtgat

SEQ ID NO: 8701 - DNA, 380939 bp, Homo sapiens
  misc_feature (1)...(380939): n = A,T,C or G, or insertion/deletion polymorphism (see Tables 1-2)
agagttttggacaaggattgtgaacccatcatatggtcagtcctcatttcacatggttctatggtaactgagataaaatctcagactgcatcttcccaactggatcactgtgaggtttacataagataaagtgatctataacatgcttagtgcagtgtgagacacatagtgagtgagccttccttgctgctagcagtcctatcaccttacagcagcatctgctctgctcgagtgtctgtacccgtcaggtctctgcaaaccgggctctcataatcagtggggagtgtctaaacctccatttagggtcctcctacggtacactcacacagaccccagaaatgcaagcagtcccttgggggagacaaggaggatgttagagagttatggttgggaagctttgtcagggagaaattagcatttcccatcggagaccatgggaagggcactctagaaaaaagagcacaggaaaaagtatggctcaatacagggtccagaaatactcacctggaggaactatgtgtatttcctgctatagtaatatagcatagtatttgtaatgaaaaattgtattctaaacctaaagattactaagccaattggcttgtattaagagccttagatatctacctagctttgacctagtagttaagcatttaggaaataatgagaggcagataaaaatctacaaatgtataagcaaaaagaaaaaaaaagatattagagaaaggaaggattaaaaagactaattaatcttaagagtttttcctttttcttttctttctagagacaaggtctcactgtgtcatccaggctagagcatagtggtggaatcatagctcactgtagcctccatctcctgggctcaagtgatcctcccatctcagcctcccaagaagttaggactacaggtgcataccaccatgtccggtcacttttttcgccctagagatgaggtctcactatgttgtctcaaactctggcctcaagcaatcttcccatcttggctttccagaagttgggattacaggcatgagcaactgtgtctggcctccaagacttttttgaggcttctgaaaagccaatgttgttttcaccccaacatttaatcattccaatattcctctctgcagtgaggcaggagggagcagagcagtataaccatcacttcttttgcattgttacagtagcagtaacaattcaacaaagtatgtatgtaactgtttaattgtttaacaatgtaactgtttaacaaagtaactgtggagagcaattttgcacagcttatagaaaacgccaatgctaggtgagctgatagagcatgctgttcagtttgcagccactaaggctaatggaaaaccttcagattccttcttgaagtgagagcataaaggaatggagggcatttggttgccatttccgttgggaaattggacaagaggttcagtttttcaaaagtctccattccataaagcaaatctacattttgcatggccaggtttgaaatagtatgcctctcccctccagctggtgaccctggagacacgcccttcaggtcaagtctctgtaaaacagcttattctggcaactaggaaattgagctcactcttgagctcagattatacgaataactaatacatgtttagcgttttatggttaggaaatgctgtcctgagaagctcatcaataggtttattagttattggtatccttgttttattgatttactaaaattacacagttgttcgggcctgggagttaaattctcttcaccagatgccaaatcctacgtttttcttaccacatcatggtgccacaggttaaggaatacagtgcagggttctgaatctctctcctgtaggacagtgcttcccaagcctggctacttgacaaatctcccaagaggtgttggaaatgcagattcctgggccttgcccctagattctgacctagagtgttattagtaaatctgtatttttaaatagttgcctggtggtctaatatacagtcaggattgacagctactgtttagttaaatcaaacaccaatgctataatttttaaccgatatcatttttagggtttggtttccaaagttggaaatcagtgtgttttagatcagtggtttcctgtcttctaaaacctaccttacctttaaagaatctgttgaaatctgtggatctttccctaagaaacacacaaacacacacatacacacttttatatataattctagagggctatattagtttcctgcttctgctataacaaatggtcacaagcatagcggcttaaaacaacaacatttattatcttacagttctggatgtcagaagtgggacaggagtctcactggattaaactcaaggtgttgcctttctggaggctctaggagataatccattttattgtctcttccatcttctagaagctgcctgtattacttggctcatgggtcccttcttttatctccaaagccaacaatgtggcatctctctgaccccacttccacttcacatctctttctcgtgctacagccaaggaaaggttctctgcttttaaggattcacataattagactgtgcccagccagataatcctggaaaatctttccatctcaagacccttaaccttaatcacatttgcagtccttttttgccatataaggtgacatattcacaggttccagggattaggagggggactattagtctaccaaccacaggggatcttaggacctctgaagcaacatggaaaatgagtgaactctaggttaggagcatctgttctagattccattcattctagatgttaaatcaacaagaaattctgcttgcctacaaataacagaatccctaaaagcagtggctcttataaattaggtgtttactttttttcaggtagtaagaagtccccaggaaggcatcccatgtcaggtgcagcagttctagcatgtgacagctgaagtctctgcaattctcctggcctttcctttgaggtggccctcaaaacagctgctgcatctccagccatgacctctgtgcttcatgcaagaggggcaagggcacaggacaaaagccataagtcagctgagttgcctctcctttaagaaacctcctgagaagcctaccacccaaataacatgctcatayctcattggccagacactgcacatggccactctgtctgcaaaagagactgggaaacatagttttatttatttttaaagctaggcatattaacactccactaactctgggctttgttagtaaggaaaatgggaagtataaatattgggaagatactagtgctctctaccacagatgaaaacttcagccaggcacagtggctcatggctgtaatcccagcactttgggaggccaaggcaggtggatcacttgagctcaggagtttgacaccagcctagacaacatggcaaaacctcgtttctaccaaaagtataaaaattagccgggcatggtggtacatgtctgtggtcccagctacttgggaggctgaggtgggaggattgctggagcctgggaggtcgaggctgcagtgaacagtgattgcaccactgcactccaacctgggggacaggagcgagacactgtctcaaaaacaacaacaaaaccaaaaaaagaaaaacaaaagaaaaccttgtgttttgtgttctacaacgagaattgatcatttttcactctcacacaaccaaaacatgaagaaagttaaaagtctccttcaaaatctcccccatagtgcctcatcctcttactaagcttgcttttctttaagcaggtcattctttttttttttcatttttcttgagatggattcttactctgtcacccaggctggagtgcagtggcacgatctcggctcactgtaacctccgcctcacaggtaaaagcagttctcctgcctcaacctcccaagtagctgagataacaggcgtgcggcatctcgtctggctaatcttcttatttttaatagagatggggtttcaccatgttgaccatggttggccaggctggtctcgaactcctgacctcaggtgatctgcccgctttggcctcccaaagtgctgggattaaaggcatgagccaccgtgcccagctattctttttctttcttttcttttttttttttttttcagatggagtcttgctcagtcacccaggttggaatgcagtggcgcactgtcggctcactgcaagctcgacccctcagcttcaagcgattctcctgcctcagcctcccaagtagctggaattacaggcatgtgccaccatgcttggctaattttttgtatttttagtagaaacaaggtttcactgtgttggccaggctggtcttgaactcctgacctcaatccacccacctcagcctccccaaagtgctgtgattacaggagtgagccactgcgcccagccagttcattctttcaacaatgtttaagcatctacctaagcctggcactgagctgggccttgggggctacaaagatatctaagacttttttctccttagagagctataccgtctatggagagggacagagagcccccaaaatgatgaacatgttctaagtgttgagatagaggcatgtgaacactctttggcagcccagaaaagaaaggggaagaggaaatggcacagaaagggtgaggcaagaactggcctggaagtctaggatggataggattttgccagttgaagaggggtaggcacatttcaggaagaaagaacagcgttggagaaggcacagatgtgtgtgaaaacccctgttggacacgttcaggggacagctagaagttgtgtgtggatacattgtagggtttgtgggaagtgagtcaggaaaggggcataaaatggggctggaaagagagatggagcctccatgtgaagttatgctaaggagatcgggctccatcctataggcaggagtaggtggtggggggcaacgggaagttttcaaccattatccaaactctgttgtagaattaaaaagtggaaagaagagaacacaggcagggaaaccataatagtgtggtcagacttcaacatgatagcagtcaattcagtaggaatcttgaatttgagtagtcaagttcatagagacagaaggtaggaaggtggttgccagaggctgggggtggggatgggggtagggttagggggaaagaggagttattgtttagggtataaagtttgttttccaagatgaagagttgtggagatggatggtggtgaaggttgcataacatgcatatacttaatcccccgaactgcacagttacaaatggttaagatggtaaactttctgttatgcatatttacaattacacacacacacacacacacacccttcagtgcacgcaaaccctgctggactccaaccttcagagcttccgatttagcagggctgagtgggacctgaggatttgcattttctgacaagttcccagatgacgttgatgctgctggtccggagaccacacttcgggaatcactggtgtacgagaccaagtgactagaatatggaggggtgctctgctcgcttccacgtggctactattgttatgaacaacaacagccggcgtttactgagcactgctcctacagcttatctcacaactgggtgaaggagcagaggatgcgcagggctagaacctggagtctaaactcgtccttcacccgggttgctctggatcttactggttgtgagacagggagggaaagagagacaaaggcagggagacaggcccagcagggccggcagagcctgtagtgacggaggggagcagccttatctccgggaacccgagcgccccgtscgcggcggggagggggcagttcggggcgccccggcgggtcccaggggctgactcccgcccgggaagtgcgcgcagggctcacggcccgcagggggcgctgccgcgccgtccagccgccgccgcccgggccgcccacctcgcgggcgcgcccctccgcagaccagcgccgcccggcccgggacccgctcgcgcagacttctcgggcggactgaggacgccgccgctcggggccgcccctgtgctcgccttcagcgcccgctcagcccgccgtccgcgccccggtggcgggcccgacgcccgcattccgcccgtgtccaggcgcagagctcccgccccggggagcttcctggccgtcggcgggccccgcggcccgcgcgctsggcgccctgctygccgggcagaggggaaggcggcggccggctggggatgggcggcccggctgcgccgaggggcgccgggaggctccgcgcgctgctgctggcgctggtggtcgcggggatccccgcgggcgcctacaacctygacccgcagcgccccgtgcacttccagggccccgctgactcgttcttcggctacgcagttctggagcatttccacgacaacacgcgctggtgagtgcccgcccgactccgcgaccctggcccgcgcggccaccgccccggcccccaggccagcgccgccgccgcctttccggtctcttccacgccgccgtcccgagggggcgatttaaatgtctccgttgcgcgcggctcggccgccgggggacggcgggagaagggaggacgccgtccggggcccgctaaggtcggggtcggcgcctggaggcgggcgggggcgtccgggtgcctccctggggtcccagcccagagcgtggggggagagccgctaragttgtctcctccgccgcccagctaractcggcttcactctctgaatcgaaaagtaacttggctcctctgcctccgggcggccgccgctggcccagcgagcctcctgaacctcgcagggcctggaggagtcggggcactggagctgcacccctccccggttttggggaacccctgaggaaggagtatagcctctccagcgccgctgcgcggggtggggctccccaggggcagggtgtctgggatccactggggcgcactggagcccagagccccggcgcccccsccccccccagctcctacaagaccctgggtggaagtggagcggagaagctcctaggatatagggaagaggaaggtgagggagcacttcccagtgacaccgccggtggggcaggtagttatctcttgggagagcctgagtctcatctcatatgggccattcgacccggagaccttcaccagaagccttaagagagagacgtgtttctatagtggccaaggggtccagttgtcccctgagtccggaggggtgggcctaagaagggggcagctctcccccattaagcaccataagccgagtggtacagagcttgtgcccaaccccagcagagaagcactaagggggggttggtgccctccttggccacatcctctggaccagagggtataaacagccacayagtggtcacttcttgataggagagagagttaggctgcgggaagttcccccgttcaaggtcgtgcctcatgggggcccaggtgacagccaggccggggttgattttattgtgtattcaccagcctgagcgtccttaggggtggcaggcagggaggtcraggtcactgatgctggtgctctcagcatgtagttatgcaggagagtcactgctctgtattggacagaggctgatggaaaagggtggtttgtggatcgcagtactcaagcattcctggaaaaggggactctgagaccagcccactaagaatcatgctgttcaggagatcagccttcaagagaaccagttttcaaagccctcacatagctctcgcccagctccacatctccctctctcacttactccagttgctgggtataagaccgagtgtgtctgttcttaacacttgtcaaattccccttttaaagcggagcaggctgaacatttttctgtgtcctgcagactcagggtctgaggttgaagaacacatcccagatccccacactaggcaccaggcacgcgggaagcactgtcaaaaatgggagggctgctgtggacagcgggctgctgagaaagggcgggcagctgagcaggcagccaagccagccggagcattgtgtgtgatctgcaggctgaggctggctcaactgccttggagctctttgacagctagagggagagaggccaggccactgtcactgtggatttgcatgggccacaggtcaaagccacactgcctgggaaaggaatgggtagagacgagagcagatctgacagagaaaaggtgttcagcctacttkgatttaaaacggggatgaagaaaagctgtgtgacatgagcagatttggccagtgtgggaaaagacagtctggccttcagcttggtacccagggtaaatggtagggagtgggtgtggagcagtaatgctgtgcatattcttgttgccagttgagatgtgggactggtatttcaggggtccatgggaacccatgtgtctgggctgctgagctcaaaagtgccctctcttgttctgatacaagctggctactctttgtattggagtgcttgtccccatagctgttcaggcaccaacttaactctactgaaatctttttaaaataatgcttctttttcctccctcacccaccatattgacttaattttttcttagattgtgttctccccttgatttctgttctcatgctgttgttttcaagtattttcctccccatccttttttctctttccctttttcccagtattctttgtcttagaccttgaatgtattttttgctgtatgtatgcttgaatgtgttttttacccaggcttggtaaactatggcctttggagcaagtgacttccaacatcttctttctcctttttctttcctctagaggctagacttattgtgcaaggctgctgaaacttaagccaaaggattcttgcttgcataggcccctattaatgccttgtccccaattttataattttatgttaattttcttaaagttagtcaccctaaatttgtaagatcaggtcctgtgaattctggatctgtcctaagtctgtaccttaacttcaactgtggggttggttgattgacttggtaactgattgttggtcgcttactcctaagcagtacctgagccctggatcttctagtcctgcttgagggacrtgtcagtcattttcaattattcgtgattgcaaacagcagcaggggtaaacaacctttaacgaaacccttgaggacaatcttaattatttcctttgaataaattcctgggcttagaattgctgggtcagagaggatggaagcttcaaggcattctttatgtattaccaaagtgccagtgaagtgtgtgtactttagaaaaatacattaatttattcagacactggaggcttgggagtagttttgcaaagggctgctctagtgcactgaaagagtatagaacctacatgggggtgacttaaaaggatcacaaatactcgtcaaaatgagtgaggaaggtaaaatatagacatgaaagggaaaagcagtatagcaaaactttgaaaggaaaagaagacatgttaattaagccttgtatcttacgtctctcttctcgaagaaattattctttgttacttaattcaatattttgcagtctaagatatttgcttcatgctaattaactacctgttttacaggtgaaaagatgtgttgtctctagggaaagggagggagaagaatgtgctggaagtggtagggggagagcacagaccccaaagtcagcacggactctgcaggyggcagagtagagcgttcccatgttgagggacctgcgggtgtacatctcaaagcatgtgaatgtgctctgttggtggaactagcacttctctaatcccataactgagcatttctctcaattattttgtagaccaaaattgtcactaatcggaggatcctagatccctgtgtaagtgtgggggtgatcttgcttttcccagccctggtgactgaacccagctctgtagccatatcacactgagcacagagccccagacccagcttctctcagagtacttgcttgagtggtcccgctgtcactgtgctctgggcagtgagaactgtccccatggctagatggaccagaatatcctggacaatgttccagatgacgtttgtatcagctaggatacaaacatgcaagggactcaattttctttttttctaataacacccagagtgtctgcctgcccagagccagcttcctctcctatagctcccactccctgagtcttctggcgtcctttgaacaacaacagtaagtgccagggaacatggacaaagccgatttctgtccccttcctttagacatggaccggttactcagctgcagggctgacaactgtaacaccctgtgatataaataaatgctgcctggctggcgtgcagcyyccagagcggacgtctttcacaccccaccccgtcccctcctccttctctgccccagacgccctggagtccaaagtggttgggtgcactggcttcctttctggagacgtgcttcctgctccctctcctgggacacatcaagacggctgtgcttaggcacagagcgagtgctcggaaatggaagatgtgctgggctttttgctttgttaaagttgtcagagygttgttcagtgaggaataggaggcaattccaagccaaggagaacatatccttgatttgcatgaaggttgagaattaaaagaacaagctagatagttctggtgagctgtctgatgtagtcaccactagccagatatattggtatgtaaattaactaaaaataaaatttaaaatgcagcttctcagttgcacttgccacatttcaagtactcagtagccacatggggctagtagctactgcattggacacaacacagagagaacattttcatcatcacggaaagttctactgggcagtgtgggtttagagcaatgatgtaagtcttaaagggctagacaaggatcaaaaggagaggtaagaaaaagaaaaagaaaaaaaatcaacccatagcatatgtgagtactaaaaccgaaacgggtgcttacatctaactaaaaattattgcctgctgaagaggttgaattgtctttctactcataaaacaccgcagggcctgatctatatttagggctgggggttcaacaatgaaaactttttgctcacaatctgacaggtgagaaaattgtggggttctagttgtgtgtctcaaatgaaatttaagatctaggctctgatgggggagaggcttgtcctcaggcaggcatgagttgttcagaggggcagaagagaaactcctgtgaagggaaaacatttagaaggggagccctgggatcataggacctgctgcccctggccctgcccgtcttgctgaggaaacacccagaaatggtggtgggagccctgccttctcataacctcagtggtgagcatctttgcagagttcctctgtcctgtgccagactctaggggaaggtgtaggtccgcttcctcakttgaatttttctagggaaatggcattttcagacattgttcctggtcctcactcaccctacagagcctgctttctcaagctctcaagaaggaacaacacatatatgaggcctgagttccaaggggatccaaaaagcatcttctcggggtttctgggaaatttctctgaagatctggagaagctggcaagggtgctgttttctgagctagtgctgaatgctggctgggggcagagacagctgtcttgcccagtggagaaccttccagggcaagaagacagtcttgtctcaaccagtcattaacggccctgagtgtgagagtgtgaagggccgggccmcagccagctctgattccctggtgacatgctgctgttcaggaaatggtctcctgataacttctattgtgatttgttcagggaaaatgttgtttttacatttgttaaaagcagccatggtgttctctgaaattccttgctttcaaggggttgcatggaattttaacaaccaaaatgaatttcgtcagatagtatctacaagaagtcagatgctttcacaggcataatattctttagttgagtctttgtaacatcctggtgagtggtttccagtttgctatttggggaactgaggcttacagagttacacgccttgttcaaggcccaccccagcctgagagatcaatgcacattcactgggggcttgtgtcagtttgcatcctttaggaagcagatgctaggacagagataggagtgtgagagaattgttgggggcgggtattgcctgtgaaagacaaatggggaagttggatgggacagagagagcctctgactctatgcagatctgattaaagtctcagtcaactcaacagagatcactgggcagaaatagctgtcctctgccagggtcaggtattggctggagctgtctgggaagagcacagcctcagctggaatcctgcagcagatcccaagaaagctgcagctggaggctgtcagctgacattccgccttgcagctgaacagcatgaagtgacccacacctctgtggctgccctggagcctgccacgcgtgaatcactgtgttgggagggtgtgagatgtgctccttggcctgcagtgtggctggggatcatctttgctcatacctctgtaatcagtgtgtggagcgtcaggactgacagtagggccattgggactggcccagaaacagaatcctgagcaatcttgccaccagctgactcacaaggtgcctctttctgatgtcagagaagtcacaggtgatggatttcagaagaaaggagctctgctttacgctgagccaccgagttctctgaactgcaaatccttttagccaagtggatttggcgatcaaccaaagcagaataaaatgttttatcccaaccttcctttttgccagaaggagtcctaggaagccgatgtaagtccaagattgggaaaaatctacagtctttgaaaccacgggctcacttggtccaccaatgtctgttctgaccaaaaaggacttctgtgttgagtttaaattagcaacagtagcaacaataacaccaaaagcagcaacartgtatctgaatattcagtagatgtcaagtgctatctacattggtactcataccagctcatttaatgttcccaacagtcctttcagctggtagccatttgggctgccataacaaactgttataggttgggttgcttataaatgacagaatttatttctcacagatctagagccttggaagtccaagatcagggccccagcagatttgctgtctggtaagcacctgtttcttggttcatagatagtggtgttctcactctaagctcacacagtgaaagggatgagggagctctctggggccacatttataagggcactaactcattcataggttatatcctcatgacctaatcacctcccaaagtccccacctccaaataacattaccttggggtgaagatttcaacatatacattttgagggaacacaagcattcagtctgtagcagctggctatcattttatccccattcatggaggggaagctgaggtacagaggcattattgcccaagttacatggctaatgagttgtcgagcacaggcctgtgcctttgcccmcccaggctgactgcctgtcaggaagtcaagaatccgagtttgggggcttcagggcgctcaaacatctgtcttgtgaagttctgttctgcctgctttcctggaaaagttattgaattgcaatagcagtagcttctctgcggcaccctttggggatgcttattcatgacccactggctactcttggggggatgctagggttctgttttctggagatgtttgatcactgagtgaacagggacccaatgattctgccagggacatttgaagggcctcttctcacaccaaggctgtctagcattaagacagaagtgtcccaggaaagatggagtactctgcaatattccatgtatccctctaacctcctggggctgctttgttactatccccccatccactctgagttctactggctcccaccacttatttaggaatctctgaattggggaaggtagccatggtggccagtgtttcagaatcactcctgggtttgtaactttattaaagaaacccacacagagtcaaacttctgcaccagtgaccaacaatatgtgagaggatgatttgtatcctcaaatatttgaacacttaataaaaggcatgaatgggtacaaaaaattagaaagaatgagtaagaatgagtaagaactagtatttgatagcacaacaaaatgacaatagtcaacaataatttgattgtagtttaaaaataactaaaagagtataattgaatcacttgtaacataaaggataaacgcttcaggtgatggataccccatttaccctgctgtggttattacatattacatgcctgtaacaaaatatctcatgtacctcataaatatgtacctactgtgtgcccaaatcttttttttttttttttttttgagatggagtcttgctctgtcacccaggctggagtgcagtggtgcgatctcggctcactgcgagctccaccttctgggttcacgccattctcctgcctcagcctcccgagtagctgggactacaggtgccccccaccacacccggctaattttttgtatttttagtagagagtgggtttcactgtgttgggcagaatagtctcgatctcctgacctcgtgatctgcccactttggcctcccgaagtgctgggattacaggcgtgagccaccgcacccggactatgtgcccaaatttttaagaaaaataaaaaatcacggaacaaatttcctccatcttagctgatctgttggtgtgttaaggccacctgggagatggcctttcctaccccttcctatctagtgtccaagtgctgtgatgtatgtggatcccagagtaaacttggtgttgtgcagtacacaccagtaggcagcattgcagagggtcttggcacctcttttgcaccaggatgggtcctagagggtggatgttccagattcagctgagtagtgttcctgtctctaccttcattgaatccctggttccacagcaacaaccagatccacgatttttgtgccataaaagggggcactgctgagatgcacaagtgcctggtggccaagagagtgggctccagcattagccctgccctcagcctgccttactcagctctctgcttaggagctgtgtgatcttgaccaattacttcagctgtttgaacctcagtttccttttctgtaaagagtaataagggtacatccctcattaggttggtgggggcattaaatgagatgatatctgcaaagcccagagcacaacacggcacacagtaagcccttgatagatgctcgtagttatttctcttgttacttgatctgatttatgaaaccaatggtctttttcatcctgacttgagatgctgagttttctttcagtatttttgttgattcattcatttattcatcagactttgagtgttgacactcaacactgaaatgaatgagatattctaacatagacacactcttcattatgtgtggcctctaacatttttgttatgctctacataaatctgcatttttgtgcattcatttacaccctgtctgcttccaaaaaggatctgagatggctactttaaatggagatctttgggattgtaaatcctagaattttgcctgcctgtttcttctctgtgctcttggaaagccaaggagcagatgggaggccacccttgttatggggagctccagctcccaccccaggctccagataagtctgggaggtagatctacagttccaggatgggatacttttttaaaaagtaaatgtaaatgtattgccatatttctcttgaaaaaaaattatcacaagaaaccaacaagaagatatcaaggctttttcttagatctgccagaagtctgtaatttgctctatcccttggattttagtgttcacttgctgctttcagatgtggaaggaaaacctcagtccttttgccttgcctccttctccagttgcctcccctcagtgtgtctgccaagacctgagccccaggccagggcagcagcctctgacctttcactccctaacacacaagctggggaccaatgtcactccaaggttggaccctgccccygtgcctctgcttttcccagttgggcatggactccaccaatttcattctctgacttagcgttatgtggtgtggattgtactgctctccctccatttactgtaacctaggctctccaggataaaaattattattgccaaccttttatgaatactttctatatgccagaaccactgtgttcatagttccctttatgcagagcaggctaccactcccgaagcacagagaagccaagtcacttgtccaaggttacccagcaagtaagtaaattacagagttgtgctttgaaccaaggtgggactgatttaatgctaaactgactgttctcagggttagccatgctaccctccctacctccacctccatcaaggccctgtccaaggtatcaggtttctaaggaaaaaggagaagggccctgaaaggaaaagggcttcttcggagggcatttgtgtctgctcttggccttgcagataaaataccataatctactcttgcaaatcargccatcctggggtgcatggtcccccaaacactttcatctgccttttccttttgtgcctcatcactgccttgggagggggatcatgcatttgttattatccttgttttacagaaaaggaaaggaagggtcagagtggccaggggacttgtctaaagtcacatagctgtagctggcacactcctgggtgtgacttcggatacactctttagggcctattctactactccaccatgcctgtcccatctcagggccttcagtaaaagtctgtggtcctggttggtgatgagattcctttgagggagggaaaggagaccaggtagctagaggagccatagcaatagttgtcagctgcatagttggataattggtttggacttagcgggaattagtgggcgatggaattaccacggtccagattccgtcagaagtggcatgccttagcttgatgacgtatctgttttctatcascacaatattgctgcatccctaacaaaccaccccaaaacttagtggcttaaatcaaccaccacctgtagcttattctctggttggcagcttaggttgggttcagctgggtggttcttctgttctctscaggactcactcatgcatctgtggtcaacttctgggttagctggttggctggctggcaaaggatggcttcagctgggagggcttatttttgctccatatgtatttcatcctcttgcaggctagcctgggcttgtacacatggtggttgggtagggtaccaacagaacaatcagaggcttgcatgatttcttgaagcctaagctcagaagtcaaaccatgcccctctgccacattcttttggccaatgtaagtcacaggtccagactacatcaagaggaggcagaaacacatttcatctcttgacaagagaagctgcaaagtcacactgaaaagagcagggatacaggaaggatggggaattgtggccactttgtaatatattacyggtggtgaaagcatcctggctgtccctgaattactgtgacagtctgaataaattcctgcccagcgcaccagaaaagggaacaaggttctattaacctaaatagcaaacacagagagaggctctctaaaagaaaatgtttactcaggaatagggcattgcagtgggaatacatgtgtcacagtaatctgcatgaatattcagggaggtaaaggaaaacaaaggcttttaaaggaaaaatgaggattacttaattgttttgagataattatctttggatacaaggatcagtgacaagggtggcaccagtttgaggttggatagagagttgctaggtagatttcctcacagaaggtgtgagtgtgtgtktgtgtgtgtgtgtgtgtgtgtgtgtgtaaggttgtgatggcctttgtgcaagattgtgtttttgcagatttttttgtgctagttcttgttatcagttgtttatgcatgaaaacctttccttcatggcgtcccacagctctatttgtcagggttttttttttttttttaaacataagtgactccattttgattctgacaacttttgcaattctaaggatctatgagctcttgggtgctgccaggagttagaactgggatgagttgagtgtcaaggtgtttgacctactactgcccagcagtctaacatttctttraacacctactttgtagcaggcactatgatgggtgttttataaacattcttttgcttaaaycttacaagaaaccttcttaggtacacttttattcctcctgttttacagaagaggaaaactgaggcttggagtgtttaagacacttgtctaagagacacagcttgtcagcagtagaggcaggacttaaaccctatgttactgcctgtgcttcttacactttatcaccatgcataactttcccataaagcttagaagccaggtagaactactggcttaaaaccctagaaagcagtcagtatccactgcttaaataccaggagcctcagtttccccaaatataagaagagcttatgaggcctttcaggtcccatggctccattgggcaagcattggtccctagtgagtcccctccctctggaaatgaagggtttggtgtggtyagaggtggctatcctggcaccagctcttcctttactcaagcctgggctgctttctgcccagtaagggatgcggacaattcctggggtttccccgtggtggacacacagtgaagaatttgactcatgtaaccaaaacrtgggtccctggggaagctttggctttgggatcaaatgctgaaagcaaacctaatgggtttaaagtttttaatccccagttgctgtccttgatctggctataattttgcctgtggaatcgctgctgtggtgtttgtggggagggagggaatctttgagacactgtcagttctcagtcctgcccagggaggcagctgcggctcagtccttctctgtcacccgctctccagagaatttacctgcagattaccctcaaaacatgagacaggttcagagcgaggtgggcggytggaatggagccttcacagacagcttgaccacacacagggagctcaggaagcagctttgttggaaaaatgcagggcacttaaactgccacaccaggagggggtttggagaggytggaaagagcatgccattggacacagacactctgggttcaaatcccagctctgccacttactggtggtgtgacccaacatctctgaatggaaaacacatgagaggctgcctgacaggatggccatgagcaagaaagcacccttgtgagcataaccagtgttggtgcatgaaccgatgcacccacactgcttattaagagaggcaaacctctggttaacaccatgacagcagtgtcaatgctttggaaaagcaaggtgattgaagttcaccttttgagtcacctgagcctgatggggaggggaaggtcttttctcttccaaaccccagcatgccctttgacatgacggagctttcacatcagagttctcacttcagagctgccctcaaaggctcactggggcttgctcaggtggggattacatatgtgagtagctggcaccagagggggcactgggtacctgttggttcccttttcctcctttcaggctgatgtggggtgggtagaatagggcacgggtgatgtatttgactactggggtgcrtgctacagcttggcatcttaacatgaataaccatcttaacctcctctggccacctgcttccctatctgtaaaatggggataatattagtacctcccgtagggttgctgtgaagagtaaatttgatcctgcccgcaatgagcctaacccagcacctgcacactctaygtgcctgctacatgctggttgccctaattagaagtttagagtcctgcattgatgagaggacctaaaaggcttatgaggccaggcatagtggctcaggcttgtaatcccaacactttgggaggctgaggcaggtggatcacctgaggtcagaagttcaagaccggccttaccaatatggtgaaaccccatctctactaaaaatataaaaattagcggggcgtggtggcgtgtgcctgtrgtacccagctactagggaggctgagacaagagaattgcttgaacccgggaggtggaggttgcagtgagcggagatcgccgcactgcactccagcctgggtaacagagcaagacaccatctcaaaaaaaaaaaaaaaaaaaaaaaaaaaaaaagggcctttgagtttgtggcatctttaactggggatgggataggaggagagagccttgcttctcaagggcaatctcttctactggctccaaatgaacataattatttgtaatcagtttagatagttacatagtacttcttaaactatcaatcacctggagagcttgttaaaatgcattctgatttaatgggctggggcctaagattctgcatttccgacaagtgccaggtgttccccatgctgctggtctgaggaccacacttgaagtagcaagcaaagcagagaagtagcttgatgctttgttgatggcagcctgttggtggggacactcaggcccttttatgtggtaaccatagcagaaaggaacatagtcttgttgagagtaccaggagagttggggcgatgtttgaagtggctaggatgtctttttataacttagcagatggcatcttttcagtggcttgttctgaactctgggccatggtaatctctgtatcccttgggatcagcctggtaaacagccagctgaattaacttcagaaaagacycactcatgggctggcctgcggtagtcttgctggatggtggcctaggtacagagcagtgctgggctgcggaggaagccacgatgttctgtaaacacatagatacaagcacattcccgcgtgccacctygtgagtgtcatgcatgtgtgtgcatgcccccttatctctagcctgattttccattgcacaggatttgggaaaaacctttcatctgaccagctgatcagaagttttgaactgaaaggttgttatcagggtttgaatcagctattgttgttagaaccattgagtaccttgggcttggaaggaaataataattcagcaggttcctttccactttagattttggtgtaaactttgtccctgtcagtcttggctctaggctggaggaagcagtgcctgggaataagctctccagggtcccctcctgcttagataacctatgaatctgtgtctgtgaatttggagccatggcattatctgaaatttccagggttccaatgccagtttgggagacacagtggaggaagaacctgttgtttcttgcagccttttcccttccctcggacgtgatgaattctcactcttgtgaatttttttgtgatttttgtaaaataaattacaagtggcaattagtcactgtgctgatgtaaatttggagttggtgggaatttttggactctgctgtgtggccctggggtttttgagtggaagaggtattttatgctccccaggtcttaraacctgacctgtggaaaggctgaggatgtttcagcagtttagacagggcaaactgctaattcttctcacctgtgaaaacagctggtcttatgaagcgcaatatgtgacttaccccagtggctctaaagctcagccgctacagcaagggggaaaattgatcccttaatgtggctttcttctcactggagttttgttttgtacgtcattgtgcatttgagttacagcagacaagggccagccaaactgctcttgtgtgggtgagggaggcaatgtgatctgtttgggaaagtgcttgctttgatttccaaagggctgtgggttccagccctgcttctgcttgggaattctgcagttgtgcccagcaaacacctggggaggtgcatcccagggcattattgaggagccgcagggcagcctgggtacctgcaccattgggagtcttgcttctctcactccccagcagggcatcttcctcatggaatcagatacagaccctccaagactgacctggaaggagacactccagtgaggggtgggtctccctggctctttgtaccctccaattcttcaggttctaggtgttgagctcagggcagtgggaattaagatgggacccacacacattcccatgaaccttaacaccatgtctctgagccaggttagtgacgatgtcctttgtgatatctgccagcctttgctggagtcccctttgagggcctcagacttctgttgtatgatgtagaggmcttgtttgtctgcccctttgcctagctggagtgttgcaggaggagcagcagcattccaagaccagggtgcagtgaatgactgagatcccaagatgaaggtggctttcagggcagagggaagggagcctgggtcagctttctacatccccaggaaagctgtccagggtcatcctaacctctgctaaacaccttttccacaaatacataatatgtaatgcactctattccaaggcatgtgggagatgatctatttcatgatacagaagaaacccttgtgaggtgaattccctctcttttctaggctgctggagataaggaacaacgcctgttctcactaagaagtggcttggcattttctactctttgaacatcagtgtggattttgtttgaagtctcattgtccaagaccttttccaaatggctcgtagctcagcacaaaccgtgcctgattagtgttgtttggtattctttgctatagatcttctgttgactgctttccggaaacaatgcataaaactgtaggtcagaattatttttgtaacatctggaggggagcttactgccatttcccccgtgttctgcactcacacaggcccaaacctgcctcttctgtcttctgggtgggtcttgcccctttcctgtagccgggggatgctcctgctggggatggcccaccctaggcagcttttcagttcaagatggaggatacagaggttcattcttgctcctstttgcatgcaaactgttctatttctgttttgcagtgggagagaggatacggtttataattccgcactgctgctattttttttcctatttgcccctaaatgtccatgctgtgtgtgtggtgggtggtaggaggaggagagggagacagaagagaaatagcgtttctaaattttctatttgttactgaaatgtaacacatccaggaaagtgtccatatcatatrcagttatcacaaatttgtataatgtcactgaggttgaatgacaacattatccgcacccccagcaattcccctccctaattgcaaccctgctttctcctctccagaggtaaccattatcctgccttctaacactatagttaaatttcacctgcttttgaactttagataaatggaatcagactgtgagtatgctattgtatctggcatcttttgttcagtattgtatttgtgcagttcatctctgtggttgcagttgaatgctgttcatttgttttcattgctgcatagaactctttttttgttttgttttgtttttgagacagagtctcactctgttgcccagactggagtgcagtggcatgatctcagctcactgtaacctctgcctcttgggttcaagcgattctcctgcctcagcctctcaagcagctgggattacaggcacctgccaccatgcccagctaattttttgtatttttagtagagacagggtttcaccatgttgcccagactggtcttgaactcctaagctcaggcagtctgcccacctcggcctcccagtgctgcatagaattctgttgtattgctgtaccatgatttacctgtccactctagcactgatgggcctttaggtttcttcttgtttttttttttttttttttgatattacatatgcagctttgaacattttgcatgtctcctggtagaaatgtatgcatctctattaggtatagtcctagaaatggaattactgggtcaaagggtaggtgcatgttcagctttattaggaactgttgaatagttttcccagtggttttaatggtttatactgccactagcagtgtatgaaggttctagttactctatatccttgccagcacttgggattttcagtctttttggtttgagccttctggttggtatgaagttgagtttctctgataactaacatagttgagcaccttttcatgcatttattggccatttggctatcttcttttgtgaagtatctatgcttgtctttggcctattctgttgacttgtcttttcttattaatcaatgaggagtttttaaaatagattttggataggaaccttttgttggttgtacgtgttcccacccatccatcgcagtctcctgggtaggtgggactaaaagcgtgcgctgccttgcctggccatttttttttgtgaagatgggatttgccatgtcacccaggctggcctggaattcctgggctcaagcgatccacccgcctcggcctctcaaaatgctaggattacaggcatgagccaccacattcagcctccttaagctttaatatgcctgggaaagatctaacaggtttcactttaggacctctcccccaagcccacacagaaaagtataataatatgattttcaaagtgagcactcagagagcccacccgtggttgggtgaatacttagccatctgcctcctattttcttatcgtaggttgtgacagaatgcctttttctcttgctgcagggtccttgtgggcgcaccaaaggcagattccaaatacagcccttcagtgaagtctcctggggctgtgtttaagtgccgtgttcacaccaaccctgaccggagatgcacmgaactggacatggctcgaggtgggtgaccattactgctgysgtggaaatgggttctgtacccttatacctwgctcttcttcttcccaggatggcctgaycattcactcacccatccatccttccctccttccctccctccttctstccaacaagcatgtattgagtacgtaatagttattaagcactgggatacaccagtgaacaaaaaaaacaaggatgctgccatccctagtcccataaattagtgggcaaaagagatattaagacaagtaaytgagagagaaaagaccagagggaaggtgagtatttgatttaatctagataggagggtcaagaaaggtctgggacctttcgacatgattagaaggatgcgtagtcgttagctgggcaggtgcaggaagcacagccttcaagcagaggtgccatttggaagcacagagcgaggttgtgcagctggagagggagccaggagagtggagcacaggagggcagcaaggcaggctggggccaggccacgtggggcctagcaggccagggcaatgtgctggaattttatyctgtgtgtgagtggggaggccactgaaatcaattttgggtrttacaktttaactagggaaagatatgatcagatggatgtttttaaaagctcactttgcgctgggcatggtggctcatgactgtaatcccatyactttgggaggctgaggtgggcacattgcttgagcccagaagttcaagaccagcctgtgcaacatggtgaaagcctatctctactaaaaatacaaatattagctgaacgtggtgatgcatgcctgtagtcccagctactcaggaggccgaggcaggaggatcacttgaacccaggaggtcaagggtgcagtgagctgagattgtgccactgcactccagcctgggtgacagaactgagactcttgtctccaaaaagataaaaaaataaaataaaagctcactttgatctagcagaaaatataagatctttggaatcagatggttctgactgcattcaaagcccagctgggactgattgggaatgtcctatagcttcttgggcctcagttccctcaccttcaagatcaagactaatatacctacctcgcaaggatggtcttgagaagattaagtgagataatacaggtgagtacacagaactgtgcttggcacatcagtacaaaggaggtattttgttataatcatgactgcaagcatttctttctccaaagtctttttgcataaagattttctaatttttttgttgttttttgtttgtttgtttgtttttgagacagagtcttgctgtgtcacccaggctagagtgcaatggtacaatctctgctcactgcaacctctgcctcccaggttcaagcgattctcctgcctcagcctcccgagtagctgggattacagtgtatgaccatcttcggctaatttttgtgtttttagtggagacggggtttcgccatgttggccaggctggtctcgaacttctggcctcaagtgaaccgcccacctcagcctcccaaagtgctgggattacaggtgtgagccaccatgcctggccaagatcttctaattattttttaaataaagagttattgtgattttctttagcagaaaaagaggtttgtgaactgtttgttactggtgcataacaaattaaggagcttacttcagaacataaatcaaggccctgcctctttccatgagaaagtcttgccatgtggttgggtgcagtggcttatgcctataaccccagcacttcgggaggttggggtgggcggatcacttgaggttaggagtttgagaccagcctggacaacatggtgaaaacccrtctctgctaaaaatatgaacattagtgggatgtggtggcgcacacctgtaatcccagctacttgggaggctgaggcagggcaatcgcttgaacctgggaggcagaggttgcaatgagctgagatcgtgccactgcactccagcctggacgacagagagagactgtctcaaaaaaaaaaaaaaaaaaaaaaaaagaaagaaaaagaaagccttgctatgtaaaaaaacagttgtctggattaaacagtatagtacatagtgatggagttgatttacattttgtggaaagttccttatttcctcatagggctgtggaccaccctttgaaagcagccagcagamcatcactcctcaacccaagtctggctcttctcctctttctccagggaagaatcggggcacgtcctgcggaaagacctgccgggaagaccgcgatgatgagtggatgggggtgagcctggcccgrmagcccaaggctgatggccgtgtgttggtaagtccctcctgggggtgctgtgggaagggggtggcactctgagaatgaatgatctgttaggaaggctggatggcatggtgacaagtgcatggctttgaggttgcttattctggactactgcttagacaaatgacttatcktcttattttctttatctgtcaaatgtgaataatgtctgtcccaaggtgctgagatgtgactattgaaaaataaaacatatgtgaaaagtgctttgtacatctcattcattacataggtatttgtgtgtgtgtgtcttaaattgaggtataatttacagtacacaaatcttaagattacagtcttgattttcacaattgtacacacctgtgtaaccatatgcccactgagatatagaatatttccatygtcccaaaagtctccgatgtccctttccagccaactcctctcacctgagacaaaccacagctgtgakttgtataatacattacttttgckttttctagaatktcatataaatggaatcctacagtatgtgctcttttatataagacttctttcactcaaaataatattttctgaaattaatccccattgtaygtatcagtagttcattcctgtttatctctacataatattacattttatgaaataaatgttatttttaactagttatttatcggacctccaaagcacctatgctgtattttgatccgtaggtgctttgagggagatagaaagaaaagtctttgcatttgagactcctgagatcctggagttgtgctgtgcagtaaggtggccaccagccctgtgtccttatttaaacttaaatttatccaaattaaactagaaattcaggtttttagtcatattagccacatttaagtggctcartaatcacaaatggttactggctactctattggaaagcagagagagagaatattttcatcatcacagaaagttttattagactcaacacraaaggaatktctaacactgcagaggttttgtttttgtcaatttttcctttaagcktttctatgaggtataatactaaagcacttaacacacccagctgtgagtgcacagcccgatggkttttcacgcatgtacacttatgcatccccattgccagtactccggaagracccctgcaccctttcccagtcagttcctctgcccttggtgagtgaacaactrttctgacataggctttctcttgcccttgacttttatcagaagctgtaygaagatttttgttataaaagcrtaagctcaagaggggaaagtaatactagctgccgcttatggagggcttcatttgggtcacatgctgcaaagctgagggtttcgtgtgtattttatcccagggaaacaggttttccttaaggcactaggcaaagtgtttttgtcccctctctaaggagcccacttttgtgttaaacttcttcatggcataagctgttaatctgaattccgtcctcagcacaattaagcatctcccccttgtcgggccccttgggagaggaggaagcagctggatgctgtcgccagcatggtgggggcctccctcctggaagccgttgtaggtcctgcacaggctccctgagcccgctgtttgccttggtttccagtcctttcatcactgtcatggctggccctggaccctctccaaacttccacattccyccaggcatggtggcctgaccctgactggacaaatgggccccagaggggctgaacccttgtctgccattctggggaaagaaagggaagaagctgactcatctgtaaatyaaagggtagcccaaggtcctgattcagaacaaaaaggaggtggtggccccgtggcagcataacacaagatgctcttaagggcatcgagcctagagtcagagtttgctcctgtgaaaatatttcctctctgcaaggaaggataacctctctgtggctgagggcttgtttccagaggggcaagacagaattctgtgttaccacagatcagtatcacaaaggagtcatttctggggacagtgaacagcaatgaggaccacagggaagatttagcaaagggagccaagaaggcagcactrgagcatttgtggataatggtgccatggatagtcctgtctaattaattgcatgcaggactatttttttaatgttttatgaagttattgcatcatccactcagtaagccactgtatatgggtgctgggcaaagaggagcatctgacaccatctgctttccttgtgccttttgtttgkttttctaattgtggccaaacacatgacataaaacttaccaccttaaccattttgagtgtacagtagtggtaaatgtatggcacattgttgtacaacaaacctttaaactttatcttgcaaaacttacatccattgracaacactctcctttttctccttcccgtggttcctggcaacattgtatttctattaagagtttgactactttagatcttatgtgagtggagtgtggtgttcgtccttttgtgacgaacktayttcatttagcataatgtcctcaaggttcatcatgttgtagcatgtgacyggatctccttcctttttaaaggcagaataatatttcattgtatgaattcaccatgttttctttattcatctattgacggacatttaggttggttctatctcctggctgccgtgatgaatgctgctataaatgtgtaccaatatctctttgagatcttgttttcagttctttggggtatacacccggaagtgggattactggatcaaatggtacttctatttttaatttttaagaaacctccatactattttcccaaatggctgcagcattttaagttctcaccaacagtgcacaagggtttcaatggctccacgtccttgccaacatttattgttttcctttttttttttaaatagtggccctcctaatgggtgtgagataatattttattgtgattttggtttgcatctccctgatgattagtaacattgagcattgtttcatcatctgcttgttggtcattttatatcttttttggagraatgtttaggtcctttgcccaattttaaattggattgtttggtttttattgttgttgagtyatcstcatggcattttgcacatgggcagtcttgctaggaaakgcttgtcctaagtcccctctgcccctgccccactctgtcctcggcacttctctttcttcccctgtatgggctctgcctccttcgtgaagcctgttaagggttttctggaacaagctgagcatcttttgtgtcattaggaactcaacatcatcttattacttatattgtgtgtataatttattttgtggccayatgtccccttttatggaagccacttggggatagagaccaaatctacccactttcattctcagcatctggaggacatctctctaaggaatggcatctgaaagtgtgtttgaataatacagggactgagggtcaatgttaaaacaattagaaaccaaattagttgccatcttttcttggtggctgattctaagtggctgaaggaaacaccaggaaacattctgtaaaatgttccttggaaatggcaggcaaaaacaagawacagtgagtgtccctatttacatttggaggtctcatagccatttgcttttttctttaatgtttcaaccctacctgtcagagctttctgggaggcaagtatttacttttaaattaaaaatgggaaggatatgtgttgttcaggtgcattttgagaacttgagaagtgcctgggggtgtaggcaagagaccagtatccccaaggagcacaatattggattccaaggttgggkttgaagagggagaggtgggctagctcttttgaaagtggtgtctggtgctgatagaaaacctaagaacaaatggagaatttgaaagctgcaatggggcgtgaaatgtctcagtgaccaaaggcattatgtggaccatggacccagcaaccagctctggcaaggaccagattgtcaggctggtctggcaggttgaccttggcttagtgcctgcccatctcagctccatggacactgttgcacctcccaggttttccccagaaacaaatgatactggatgtaaagatagcatcaggattagaggcaagccccttcccttctcactctctcatcctgagcttcctgtgtgcagacgacattttaagaaatgagcggggaggggaatcacttcttgaaataaccactgaacaaactctgtataggcactgactgctgctcagactttggaggacaactcaaaatgttcaagtctaatgtcgccccttttcatcagacttgccaaggctcagacaacaaataatttaagcttctagattatttttgtgcagaagcagtattctctggttctctttgtcatttcctttctaattatcagggctgtccttatctgttcagkgcttcccatctgtccatttttttttttcaaagccacagggtacatttttgcatttacttctgttgctctgtttcctgattttttttaaagtgaactttttattgagctgtaacacacatgcagaaaaaggtataaatcatcaatgtatacctcaataaattttcattaggtgaacgtcctcagaataacattttcacaccccagcagccccttcccaatgcccctcctggccacttcctcctcggttggggagcttcttaggggagtctcatggcatctcagcctctctgtgatcctgctccccaccacacaccattcttagcagccaggcccagttgtggccgtgcactgtggacctggatgcatgacaaaggctttggccatctctatggcaggtgcgaatgtaggagggttggcagggactgatgtgcctttgtggccgaagcacccggaaagtgccattacccacctctaggagggatgtgttgtttccatacaacaaaaaaggcctttgaaataaagtgtttattttctttctctttttcctcttttgggaggaagagcaatccttataccttgaaatgtgtcagattctaatatttggagtgggmcaaggccctccttcccctttcttatgattagttgaaatctgagtttgagcaagtcttgctgttttcagagaatgctctccytcycctgtycttccctcacagccgaactcatttggagagattgatggagttactaatgctttggagacagtccctaggaatttttttaaaatgtagtggtcagattgacatgtgtgtatatataatgataatcaaggctaaacacagtcttctctttctgtaatttatattcagagacactttgcattgttttcctacatgaatccttcctttgacactttgatctctgacctcccagaatgcttttagtttagtatgaaatgcaatatttggatcttctaggaattttccaagatcaccccttaaatagtttatggcacttaaaaaatgagacaatacaccagacattaagtacagcaaagccttcctataagtgtcagtgtgcagctggctatcagacagcaccatgataaacatccgcctcttttcacagcccctccaactcagaaatacaataaaacatggtcaacccttgargccaagggctttgctaagtccaaaaacttagcaaaaccaaaacataactgatttacccacaaattagataacaataagtgattcargtttgcgagccataagaattgagtcagaactttaaaaatcaattatttagcagtatggagtgrttatttacttagtgatatattttttatagttctctgcctcatatcatttcagtctatttagaaacctgctattttagcacaaaacartatcaaggagaggagtgaatgtggtttgcagcagraaaaataacaatagattgttttctgtagtttaatgtcatacgacaagaggcagaatgtgggcaagctcaggttttgagagtcattctgagtgtgtcctcttttgccattgggcagagagtggccttgtccagggccttggtggcagtggcttgaaggatgaagagcagagagcttagaaggctgtgatcttatcatagaatgatgtcagggagaaccaggccccaagagccccctcactcactcggtgacgtggggcattccattcgaccccagagtggttatttcacatgtcctgggacatgtggcaggggggctgtaaagaggataaagtcaccaggcctgccccagggggtgggttttgatggcctctcaggtaggaatgagaagttttaagatggaaaatgcttcatagtgaaacaaggaagactcagaattcctggattccagtgctgtttgcagcacttactagctctgccacttaggcaaagcactctttgatacatggtgctcttgtacagaaaatgggaattctaaagacacctctgctcaccttccaggattgcagaagaggtcagaggtaggccataagaacgctaaatgttatcacttacgaaaacaatgcgtttgagggaggcaaaccaagatgttaaaaactgattattttcaaaagcaatattttaagaaaatgcattcactggctggggtgaagtgaactgatatcagaagtgagtagtgaatgcccaggagaagtggaacgggctgggcagggtagagtgtgtgcctctgagtaagcagctcggctcttcatcagcacagcagtgacatctggatgtgcagagacatgcacgggaactggggccactgtcatgtccaagcagaaggcaggggcatgtttagtgtggcagaaggacgatccaggcctgcatcctggctgctggcactgctccagtgtctgttagcagagctgccctgcctcatggtgtcttgcgtggcttcgaccctagtgctgagaggctcctctggagagctggccaatgcatctgtccatcttcttcgccagtatgcggasctctcrtgcaccccaagacccttggccatgaaccttccttcagctttctcctcagagaggccttccttgacctgcctggcaaaaccagccactccctggcatgagggaactttctggtgagatggagatgttctgtgtcttgctagggccttggtgacatgagtgtgtacatttgtcaaagcycatttgtgcattttgctgtatgtaagtttccataaaaaaacaactctccacacacatttacttctagttaatgagatgcatgctgaagtgtttctgtgggtagaaacatggttgaatatcagccattcctcccttccctgctgtctccacatcggttcagtcccttgggcctgtcagctctgaagccacccccgtcgcccatctccactgcccctcctggtccagacctgcatcatctctcacctggtgttcatttgcacttttgccctcctgcagtctccaccaagcagccaaatggtctttccaaactgtcacttggatcatgcttctcaactgtgtaagactctccaccacttcccattgcagatctgctgaagtcacagccattcctacgtccccctgtggtccaaccttggccgcctctttgatcttatctccttcccaccatggkcactccagaccggcctttctttctcttgagcctctgagcctttctcacgatgtatcctttacattctgctatcctttgaatcctcccagaaccctcttcccctcatgcttcaggccttcccgacctctggtggaaactatccttcccactcccagattctctattctataaccttgtttctttccttcccaatgctcaggactagctacaattctcatttgttgatatatttatttcctgtctcctagtaggctcccagtggcttgttcctgttcatgcagttttctgatgcccaraaaagtgcctgttatgaaggtgtggctttctggtccctctgctcctctcttctcccacagaaagaaacatctggcactgacaggagtctgctttgtgatcttttggggccaactttcctgctctcaactgctctctatccctttaggcctgtgctcatcgctggaagaacatctactatgaagccgaccacatcctaccccatggcttctgctacatcatcccctccaacctccaggccaaaggcaggacrctgatcccttgctatgaaggtgagcatggattgatttttcctcatccccctacccacctcatgccctaagcccgccttcccacctctatgcaccaccagctgaacatttccccagctttccacatgctcatgatagggcagcactgtttgctcccagatggtctcttggtccccaaggccctgcccagagaagaggcaggtacagagggggcagcagtcccaggcctttccaaccctcacctgacttggctgcagagcccacggtgcttaccaagcattatgaagtctcagggaccgaaattcaccaagcctcagccaagtgacctaacagctgccttggttttctggtaatgccaggtgctgtgttgccttgggaaacttaccttctctctctggacctcagtttccttgtccgaatattcagtggttggcccagatgatctctacagccccaggcagctccaagtcagtcattaggctcccacacagcttctggctgcactgtggacagatgtcctgaggctggggggagaggagacccaggattcataaagcarcagctggacagaaacctgacactctgaactttcagcatttcatgacatttgaggtctgactttccttcccatgtggtcctgcagcccaggcagatgctggagaattgggcgcatcctgaatgtggttttaagagctcctcgccaaggggcacttggaaggaaaatgtatcctctcagacttagaaccttcaaatgcctgggcatcgaggacagtcactaatagtgattgagtcagtcactatttagcccagtcgaatctgagctttaagcgttcagaaaacacggttattttcttcagtttgatagctcgtagtttcaagttttctcagcctaattttgggtaagctggaacctgctccttctgtaagtgctggactatttatttcttaattcccctcctactttatttggacagaagtctcactggcttatgtccacattgcctttgggcctccctgggttttcctaggtttcaaattttgtggacactaaaaaggattcatkagaaacactatatggacactgggacccttctgggtactgaggtgacacaggtagggtgctctgggaaacgtcccccacagaagagccagcaagatctctgcaggaggcacaaaccctctcccctatagagtgagccttcctttggtttttctttctcctctgtatcagcatttgatcagctctggctgggccatgtagggaaatgaaactctggccctgtttatatctgtattgtcccaaacagaagaagaacaaacttcatcttaaaaatagaggatgatataatcaatcaagagtggagggatcgttggtttcagaaaygcaaagcatgtgtcaagcctgggtttccactgccccagtttactcctcctttttcctaaggaagaaaaaggaaaagcctctggaacaaccggtggggcagctcttcaggctgagaaggagcgatgggctcagcagggtgatggaggcagtgattgttgaaccatactagttatgcataggaccagtactttggttttcccagaagatgacatgttgtgacagggacacatgatggtccctgatgattcctctatatataccacaagcacaaggacagccctcygaagagggaggtggagttcaatgtccatgtgtacgcaggtccacgaggctcataattctgcattactttctattaagtagctgtggatcatcagtaggccagtgttgatctgaggtctttacacattctctcatctaatcttcccagaagctgtgaaaaatgtttgtttcttttttttcttgggtctgattacaggtatttwattttggaaattgttctagaagacaccagtgaggcagggggaagtaagaatgggaagggaaggcagcccatggaagatgtactcctcagcacgttacctgggcgagtgggtgcagtctctggggtgggtgctggggccagtgtggagcacacatctagagtcctcctgcctgagggctgaggggaaggggcttcctccacctggcatcctgtcctgccatgtgtgtgggctgggaaagcctccaggacagaggtgctggcaggtggcagtcaggccacatcataggaacggtggtaggagctggggggagacaggtgggatgcccaaaggccagcttctgtgttgtcattctcctgtgacaggagtaagtggagactcagagtgtatgtgaattgccccaggtcactcaaacaataaatggtggagcaggattttgaagctggcctctgtctgactcagcaaaccattttgtgtcctggtaattaatggtaatttctgttagtttgttttttagggtttctaatttaaatgagaagtaaaagccagtcarcaaccctcacaaagcaagaaagggtgactgaactatcccaaaaatacaatggacttaatgatggttaaatggaactggtgaagaaattagcaaaatgattatgcccctgcccaatcttccttcccatgggcgcacacacacttttatatgctaacccattcattggcccagggtgggaaataagggatggatgggkctggcatgtggagtaytggggtgtaagagcagccccttagaaaaatgggggactaaattgaaagtttctgtagttcttggccctgtaagaggagaggggtagaagatgctgagtatttttctagaagactggactggacgggtggggctgggaggatgcyggccgtagtgagagggctcttgtctgtgctctgttggctttaggcatctccacctccctgttttgtggtttaaactagacctactwtggcttttaaggccaccattatttcctyaatgtggagaaactcagtaatgcaagttctctgttccacrttagggrtcacattatggttaaagacaatgggaagattttagagtttgacaggacctttcagataccacctagaacagcctcctgtctttcatgaggtccagagaggtgatggcctgagtttttctttctaatctgtwattcacatgccacacaatggagaggcagagtagcttggtggccaatgcacagattctggacacagactgccggagttcaagtcccggctctgctacttcctcttattaacagtgtaatctcagatgggttatttaagttctctgtgcctaaccaacctcaagggtctatgaagaggactgagttaatgcttctaagtccttagaacagtgtctggcatatacttgctaatatatgctaagcatatatatactaatatgccatgtacaacatactgtattctgagcaagtgtttgttaatcatcatagggtgactgacttgtgtaccgggaatagaatccacttaatcttaagtacttgttagttgccagatagacaaaacccaagtgacacagttccagctaccaagaagctccccatctacaggggaaaacagagaggggacagggtgttttaaaagtgggagggccgtgtggagagagaatttcctgccagtgtgtactgctggagcccgtccccaagggcttgagctgcatccaagtgcaaggtggcattatttcattttacaattggaaaaactgaaacccacttaaagtctgcaggctgttgagactatggaagagagggatggtggaaattcgagactggtcatggtggtgggaacagggcaagggaggagggggacggctgcctctaaacccacttcttgtgggatggtggaaagaccgtgggaggggctgtgggttgaggacggctctgctgcacttctgcccctttagcctcaggcctgtcacttggcctctcagtgggagtcgatgctgtgatgcctccactgcatttacygctttgggttatggtgaggagctcccgagaaaactcaggtgaaagtgctcagcaaggccacccattgttctataactgtggcctcatggtaagtctccatatgggccagctgtgctcctwtacaacattggaaggtcggtttggttgcagagactctaaatatgtggggatctctccaaaatgtctcaagcttttgaattcttaaaaaattggtctctggtttggcactaggacatggcttctcaggtgcttcctgtttctggttggatgggaaaagctaccagaatatcctgttggaaccaggaaaaacagaggaaatgggaaataaaaatgaatttaggacataaactcatggagcatatccttcagtcagtttagtttgtgtttgtctgatgtgagaacatcattacctaccatatgttctttggttttatcagaatgtgtgagaaaacgagakctttggtgggacgatgtatagggaaaactacttgtaaattaaagggcaagcactataaaacattaattactattaaccaagctatgatattttaggactccgaaatgttaagtcaatgcatgtgataaaatcaagtacagagatttctttcatcctttgcccttgagaccactgaggcaagaagccggaacttagcaggagtgagactgcaaacaagttgyctttttattgtgaccgaaaaacctgatgagtgtggaatagtttgggagcagcatggcaaattaacaaagcctgttcaagattaaactctgagaaagaaatgcaagaggtaattatgatgccatggtatgttagacctaaattgtggaatctggctttactactcacttattgctatgattaaacctatatgctcctactttctgacttagtgaccttaggcaagctccatgagcctggtgccctcatctataaaatggggagattaagatctacttaagaggtatgtgaggtataaagtgcctaccacagtgctcagtcgagagtgaatgctgctcattgccttcaattagaaaatgtaaattttctaattaattttcaagcaacataatagtattcttaaatattctcagaaggtgtctaacatatcctgttttagtgactagataatgaagggtagaaagctggatattcctaaaatgattttaagagcccttggcaagttataatttctcaaatactgttgaagatcatattggcacaatttggttggtaagtgttccttccctctttttgtagatgacctaaaactttaactcatgccatgtttaaatgttcttaaatttgggattgttgaagtctgaattttactgtgctttaaaattgtgatggaaaaacttcctatggattccaaagatttstgtaccactctattatcagggaatgactggcttttatttctagtgtgtgtttgcatttcctaggacagtgatcatttccagggaaggaaatagattacccattcaaaggtgaagatttttttcccctttaatgttaaaagtggtctccacaagggataaaaatcaacgaaggtccatttacaaatgaaaaggaattggggttttgttgtatttttgttttgtttttgttttggagagaaccataaaaggctaagttgatccatttaaaaattcaagaacaagcctcataaatttttattaaataaagacctctacatttacataggattttatggtttccaaggagctttaataaacatatcttatttaaataaatagagcaaattaaagagaagaggatgcagttgtacattatggccagttaaacagagagggattctgagggggaggaagggagggwggccccagaggacagccatggctgtaaggaggaggccagaggtctccagcagggcctctctggggctttccaggtttccttggagccaagaattttaatcttgggcaaacctgtctcctatacttcaaacgtgtttccatgtattacgtggaattatagactacctaaactgmatcttttgtttctctcagaaaaattcacagattcagattcacctaatatttattgagcacctacctggtgccaggggttgtgctaggtacttaacatttttgatcttactgagtaatcacatcattctcagataagtattcttatccttgttatacagatgagaaaactgaggcccagggagcttgatgaaggtcacaggcttattagtcagaggaggggttgacggcttttaagtgtgtagtaggtttctttgtagctacctgttctgttgggatcctggttttcttggtgattactgagtgctgtggcctatcacagaaaaaaaagtcatattttttttcaatggcataattttatgaatttttgggacactacactatagacttgttaagctatgtttcagttttgcaattatagatacactctgtagacaagtcccagtaggtacagagggcagacgtgggtcctcagactgataaaatgtagccaggagaccaatctgctctagtctggagtggctgcttactgggaacatttggtttcagtatctgcacagcagtttgtctgtccatgctttggtgccagttatttcatgagtctttttatttttattttttggttatatagatcagaggtttcygtgttgcccaggctggcctcgaacgtctagcctcgccttcttatgcgccaggacaacaggcctgagccactgcagctccctatttcatgagtcttttagctttggtcccaaaattgaattctgctcagttctgagctggggttctcactgaaatgtgactgtcccatgttcagggtcacttttttttttctgagagtagagcatgacayaatrcatagtaagttgcatgtctatatatacattattatgtgcctgtattattacttgctgctgaagtagggagttggcaaaatgggttgctaagttctaggtaaagggaacgctttaaagattacaaaactccttttttggtaatattaaaaaattattggccaggygtggtggctcatacctgtaatcccagcactttgggaggctgagactggcagatcacctgaagtcaggagttcgagaccagcctgaccaacatggtgaaaccctgcctctactaaaaaatacaaaaattacctgggcatggtggggtgcatctgtaatcccagctacttgggagggtgaggcacgagaatcactggaacctgggaggcggcggttgtggtgagccaggattgcatcactgcactccagtctgggtgacagaatgagactctgtctcaaaaaaaaaaaaaatattgtaaaaaataaataacataaaaattaccattttaaccatttttaagtgtacagttctgtagcattatgtacattcacactgccatgccattatcaccaccatccatccccagaacttttgcatcatcccaaactaaagctctgtacccattaaacatgaactcctcattccctgcttcccctagtccctggcaactgccattctactttgtctctgaatttggatactctagacacctcatgtaagttgaatcatacagtatgtgcccttttgtgactggcttgtttcacttagcataatgtcckcaaggtgtatccatattgtagcatctgtcagaattttcttcctttttaaaggaaggaatatttaataakattccrttgtatgtgtgtgccccacatttatctattcatctgtttataaaacattttstttggrtgataagaatgttttcactggaaatgtgctttgtgaagcataagggagtggcagaagcagatcagaagttgggagccttgctcttgggtcctgatgctgaggctaatcagcagtgtagctttaaacaaaccacttgctctttctgagcaaaaatattccatttgtaaataaatggacagagttagagttattaggcattccctaaagrtcttttccccttttaaaatctttctttcatttaattctaagtttctggctttatgcactttgtgtttcatgcacaccatagcttagtcatcagttattttcataaaatgttctcgcttcctctttaacctagctgtttaatttatttacattttttcccccatttatatggtggtcccttgtaaactgagggtagttttattctctcttcatttttctgtataattgcccttttttttttttttttttactagagctgtgtctgcccaaatgcattgtttcctgtattgtacaattatcagttatttagatttgccastctgttagaaacaaaatgcttgttcctcagtgccacaatgaaatagcacttgaacataaatttaattttctcagcaaggcaatttttacttctaytgaagcgtgcgacttgtggatggagtaatggtgagagcacacctggacaggggaggggcaggggttcttattcctgttgcaggtagcccctactgctgtgtcgttcccctatttcctggggttcaactgcatagtctgagctaattccaaytggctgttttaaagagagcagastacgatcctgagtggcggggtgagtagtttggtgggaagggtggttacagaacaggtgactcaggatgatttgggtcagagcaagtgaccaggggtgactcaagatggagcaggtaaccagggtgacttaggttaaagcaggtgaccaggggaacagatctgaactactgattagaactggcgggaaagttgtttactgaaackagaggcaagggggccaaagagaaccaggaagttaaactttaaaatggaaaatcaaagaataagagagctgaacatattgacatactgattctttgaagagaaacttggaattcgctataacaactccttggtgaaattcagaataaagactggcaagctatttttcccccagtattttatttcagagctaagctaaggaactacagaaaaataattgtaaaattgatgtgttaaaaagctttgaaagacagaactttctcaaatgggtaatatgaagggagattattaggaagaatatatgttatgctgtatgtgaatcttgatctttctgtggaatggttttatcctggtcttttggaaagggtacaggaagtgaccccacccgattggtggtctgcttgaattacattcattaatgtaggctccatgcattgagttgcggattgtgaacatttggaaaccagtattttttttcctctctgaattgccttctgtttagacagggcttaataaaaccagcagctaaaccaaggaaaatactcccatttttagaatggaggagccatacgacttaatgaattaaagcatgtaatgcaggccaagtaattcaaacccacccatggcaggaagagttccacaacctggttccagctcctctaagtgacttctaagtccccttgttcaaccctatcttttgggtctcagatttggcttcccccccsctttttttttttttttttttgagaccgaatctggctctgttgcccaggctggagtgcagcggcatgatcgtggctcactgcaacctctgcctcccagactcaagccatcctcccacctcagcctcctgagtagctgggactacaggtgtgcaccaccgcatccagctaatttttgtatttttgtasagatggsggtctcactttgttccccaggctgattttcaactcctggactcaagtgatctgcctgcctcggcctcccaaagtgctgggattacaggtgtcagccaccgtgctggccagcttccccaaakgtaagggttaggtttgttacagtgcctgtgagctgctgtcaggcaaagcctgcttttcccctgcttctttgaggtggataaatgttttgttcagtagtggagagggcactagctattgtagtcctctctgcagggccatgtccctgggggcatttggagaccaagtagacatgcccaggagcagccaactgctgggccccacggcctttgtgtttgtgcaggaaaagttcttcctgggaacacaggagactggaggtcacccccaccccttcccaggtccctccaccctgcacttcctggacttgtcaatggagggagggtgtgtgacccaggcttgttggggatgttgtttgtggggcagccccttgcctctctctgcgcctacctcacttcccatagctttgtgatataggctgtcctgccatctcaggtctagacaagcaaaatcaagttgtatttttaagttttttagatacgagtatggtagaataaccctatgtacatactctttggggaagaaaggctcgtacatgaacatttagaagatggattagggagaaacctaaacctgccctcttgacatatatatgaaggaatcaggttaaaataatagtagtgcccttaactcacagaaatagcattcaaaggagtgaaaacaatggaaagcatgcttgtggcctaggctgtggaaggtgtggaatgtgaaactgtctaatccaataacacccactaactttcctagactagagttgccaggccccacaactgcccccaaagtgtgtgtggcagggatcggataggtggtagaaggattagaactggattctactctaccttgaagggattaatgacagtcacagaagtttctgggaggctgggacatggcctgctctctgatctagatttgattataggagccagtcaggggcccccattgtttgattccttgccctagagcatcctgagaaggcagcttagactttgggtttcagaaacatgaaagtcagtgatggtaccgacttccatgtgtgtcccaggccctcagacctctggtggggcagtcccagcttgggaaggcggaggctggcctgaaaacagtgcttcatgctgcctgaaacaggggtgcctttaagggcttccccttgctggccttcagcctgggccagaagtggggtattcttagctcccagtgaggctgtcaccacctcggaaacccgaggtcctgctcccaacatagaccacaccaagtacagtttggggaggaggcactgaagttctcaaatctcccattttttggagaccttgtcataaagagaccttgagactgctttaaaagatgaaagagtcccacacaattcctattcatgtcagaaatttatgaggctgaactggtggtgtgtcttgcactatagtttcattcagctcatggggtctgaatttcctttttatgtttcattttttcaagagttacaattgggtgtttagtctctagrgtcagtgggatggatatgctttttgccagacttttcacatttaatatgtaactgtttgtttaggttgagacattttgatcctttttgccgttgtgctatttgatgcaggatttattattaatttgtattatttcttgctattatgaaatttgatgcaggatttgttcattgctttgcactagtctcactcgcagccctggtgcaagattctgcagggaacaaacaagttccttttgtcactggactgctttctggcaggtctagcagttgtccttataataaccggacaaggcgggagaactgattttatcctgcatggaagaggagtaactcaattgacattctttgtcatttagcagtcagttaatggccacttactggaaaatgttactaggctctgtggtgagtgttgttagaaactgaattactctgtatatttccccagggccctttttccccttgcctggagtagacactcagaacggcaggaagtggcactgtgttgcaatcatagtttcattgttcctttgtattttgcatttcaaaaataatgatattgcttttaatggtaccagagacttgccaggagcccagggggtggtacagggtcactggggtagccccagcctgagggtgcccaggagtggtctgtggaaggtctccagcaatgtcagcctcacatgtgattaatttgagtcactgtgaacatctctccacctccttgactttacccatgaaatgatttccaacatccagtcactttcctgggtatttttagtcactcactttgcagaacctttgatggtctacagaagtgaaggaatgggtttctaagtccaagctgaggtagaatcctggcattgccatttactagagctgtgtgaccttagacaattcacttaacctctctgagcctcartattcttacctgttaacaagtggggatatgggttcccagggatgagggaccggtgaaatgatatgcctggagacagctaacacaatgcctggaaaatgctaagcacttgtcaaaagtttcctacccctcttccttgccagcttaaaattataactgcagcagcagaacgcccccatttgttgggtagcagtgttgtgagctgagggggtggaggagaaaagcttatctgttagttttctttccacctggagagatcttccccctttccttccacacagcaatagtgtaaccraatgccagagcagtcccttcttcttgcggtcctctgtggacggcttgtttctttttggatggtaggaggcatccaaagcctcttttagggaagrttggtcttcttccaggagactccacactgggatggccacatcattccatttctgggtcacgttttcagctccttgggcctgcaagggatctctgtcccttctggagtaaatraaataattgtmactagcctcccacttaatgactgtggctattgctcctctttctcgcacacgaggggaggaagtctgctggggcactgggyagcctcccttcccgatggcaccagagcctggatttttgaggtctggtggattcctgagactttccttcctcaccccagtctggayrgcatccctgggcccagcctgccgcggcactcgtgggaagtggctggctggctctsctggctccacgcacagctggcatacactgacatggctgtggtttgcttctmtctccttccttscccctagagtataagaagaagtacggagaggaacayggctcctgccaggctgggatagcgggcttcttcacygaggtgggtgtctgctgtctgggcatttctgttctcttgtgggtgttcatttccttgcttatatgattttgrcaacccttagaggtgggacttctggagtcccagatacttgagcctcgagggagcagattctggtcctcacaccagaggaggctatttctacctgccmggagggcaccagctggccagagaccactgggcagaggaggtggggtggctcatctcgaggctacccctatttgatgatttytgtaggagtctgcttgactctgagacctggggaaggagtcgatttggggatgtgtgagtgagatgacattcagtcaggttgtgccccatcattggcgrctgtgcagatacatgaagcgtgtgagcatcccctcctagcagccttctctccttagtggagagacttgtttgtttttcgagacagagtcttgctatgtcactcaagctggagtgcagtggcrtgatctcggctcactgcaatctccgcctcctgggttcaagcaattctcttgccttagcctcccggttataggcgcccaccgccacacctgtatttttagtagagacggggtttcgccatgttggccaggctggtcttgaacacctgacctcaggtgatctgccagtctcggcttcccaaagtgctrggattacaggctgagccaccacacccggcctgagagacttggttttacacacaactctaaccattccttttcccagattcagaaggacaggacacctgcatgcttatgtgcccgtgtggtagtagcatgacttttggctggtagtacatttttagggactgttttcttgtgtcattcttacttactgtaagtttgcccttcgtatcagttcctyctctctcaaacactttcatgactgcctgctggcactgtctatccatgtggttgctcaggccaaaaaaagagtactttttacttctaattcatctgcagtcctgttgttttagcctccaaaacacatcccaaatatgacagcttttattactattacaatcrcctccattatcaccatcatgcttctagaaaggccaccaccatcacctggaggtacactggccctgattggtcttcttaygtctattatgcttttttaaaaattgtggtaaaagatgcataatataaaagtcaccactttaaagtgtgattcagtggcattagtgcattcacagtgttgtgcacccatcaccatgggctaggttagaacactttatcacccagcctgcatccattctgacctgtgaagtgtgctttctgcatactagccccagggtccttcaaatgaaacccatccttctgactccgaggcttcccagtccatggaggattacaatgtaaagctcctcatcctggcccctggacttggctccctgaggccacctctctcttttcctcactccaggagagcagagagctggggaagggcatgggacatggggggtggagggaggatgaagggtgctctctggcttccaaagtgagggcccctcctgagtcaggagcaagactgcctaccttcctttcagaaactgctgtttaaatccaaagagracatagacagttggcaatatagtgtctgatccagaaagcaagaaagaaaaggcagaaagtctgaagttttatttycactctcaaaccaataaataggagatgctaccctccaacccccattccgcaccctcagtgattcttacctcgctggagaatcatttttatgacagtcgacagagttctatgccctgggaatggcaccgccaatcatcctaaccattgaggccgaatttaaagattgttctctcacctcactctcctacttctaagccaccttgcaagtcccaccacctcctatgccctcaaaacctctaacawtgacatccattgccctccacatcctctgccaccctacaaatctaagccatagttgtcttgcttccaacccactgcggaatccttctgccgtcttgcttccacccttgcctctggacagactggtccccatgtagcagccagaaccaccttttacaaacaggaaaaatatcatggtgctcccttgctcaggactttctggtgtcttctcatcctacttagaatgaaatgcaaatgccttcccttggcctcccagccttcatacctttccaggctcatctcctacctcacccactacatggtattttcagctgctgctaggacatgccggactcccactggtggcattgcactggagatccattcacgtggctccttgtacacaagtgtttctttagaagagacactaatggaggaactgctgggtccaaaggcactcagatttgaattttgatacatgttggcaaattgcacttcagacatgtttaccagttgacactcccctgcattgcttctgtctctatcttctctcactcagactttaaatttttgttatgaaaaaacatctcgttttaatgtcactttccctgattattaatgtcatttaatatccttttaaaatattgaccatttgtatttgttttcctggaagttgcctgtttatgttctcagtacattattctgttttgttgttgttgttgttttcctggtttttaggaacttgttacatattttcaacagtaatctcttacctgatctatgtgttgcaaattttttcatcagcctttttcttatgttttaagtttgcctatgatgtctttatcatcctggcaataaacatgcacatttggccaaatctatcagtcttttttttttttccctctagattctaaacttatctcttaagaaggttattccttatgtatactgcaagttggcatgaacagctgggcaggagagtgcccgggatctacaacacatgtctgggctgaacaaactcccatattttatacttatattttcaatatacttgtatttttaatagcactttcataggttgtttttaaaaaagatttcgatctttaatctttctggaatttgtgttgtatacattgtgtgatagaaactaactacrttattttyctaaatatatagttggttgtyctgatactggtttgttaaacaacttttcctctccccattgaaatgccatcctgccgtgtggcgacttcactctcttcttccatctcagcaaacatttagattgtgtgacaactatggctgttgttcctccaacaggcctgtctagtattgtatgacttgagtcaataggcagtgggaaccactgtaagttcayaagcaggtgacacactggcagatggcagtgttgaaagaaaggctatttgagctgggtttgcccagaactttgggagtggaagggcctgaagggaggcctggtaggaggccgtgatgtggtaggaggccgtgaagcaacaggacagtgtagagggaggcttaaggaataaaaatgattgggggaggcagagaatatgaaggaaatgtcaaggggctgggtggccagggagctgtggggtagaggaaggagggtttgagccaggcttctggagaatggtggtgcctctggtgaaaaggggttgcctgagaaagaacccattgggagatataaactgccaagtctgctttcagacacagggagtgtgcgatgtttttagaggacgtttggacttagggactggagtcctgcctggggcagaaacttagatttggcccttgctcatgactctcttaggggatgagtgtgcttagtgtagggcatgggggagacacctccctttagatgggaggagaagctagattgatgggagacatcagaactcaacggagatgttgacagagagccgaggagaaagtgttcccaggagggaagtgtcattatgtttgccgcagcagctggcaagtcaggcattgggctgagtggaggcagggagtggtaggaggaaccggcggggcaggagtgtggaggggaagtccaggtagytgtgcaagctcagggtgaccagaagaacagaagacctgctgaaatccaggctttgggatttagaacctgagggaaacatggggtgtcagcatgtgctggctgtgctcatggtacagcaaagtggggacatggtgggtgtacagagtgtccggggagggtgggcagtggtgagtgggawggcagcccctctgggcgccactctgtcctctgaccccggcctgctgtctcctggctactttggactttggcctccgcttcagttcccaggcttttggcctccttaaacaggaggtctttgaactcactgcctgccttgtttctggaagttcagctgtttgtggctgagcaggaaatgtggttgaagggtccaggccagcgcgactcccctcctctgccctcttgctgacctcgccacttgggcttgccttttctgtgagctgttgtcccctcccaagctggacatggatctgtggccttctggtcatagctatgttgccccaaaatattttggcctaaggtgcctgcttgacctacaggtcagtgaccctgagcttaacaaagccttcggagctatggataccacctgaattttagcctgacattgaggattagagagaatttcctgggaggtttatttatttttgtagatgaggctaacagaggtagtagatactgcttagcagcaagagaggatttggaccagctgggctggcgttcacgcctgctgtagaagcctagaggcacttgggtgggagtttgttcagcacggacttctgttgtagatcccgggcactcctgcccagctgctcatgccaacttgcagtacacagaggaaatatatggcttctcccaggcccacctacataccccggttcctctaggkgttctgctaataaatgcatcttgggaaaaagctgcattgcttattgatgggattccacaaatgtgatttaggtagtggtggcctttgcttagagaagctttcatttgtgtgtgtgacattgacactggctgttcctgcatggtggggagctaagtattagtcactttttcctagcacttgtgaacagcaccagaaaggtcacaagcatcatccatagggaacagaaaaaacaactatgagggatttccaggaaggcactgtccctcccttcagcctcagccctgagggtcgcaggcttggccctgttttatgtagtatgggctgaagggagaggggtgtgagcactgggggcggrgtggcgtggtgcggtaaaaacaagagctgttggttttaaaggtttttgaagacaggaattactttatcttaccctgtttataatgtttgagaggggatgcagtggtatggtaggcatacatttttcaacttttatcctgggttagtctaaatcatcagaaagcaacatatcccatccctgcccccaatgttccgaagagcctttgcaggcctgtgctgatgctcaaagctttggcctgtgcaaagctgcaggtggagaaagctctgcactgaggatacatctggggctgaggaggttgctcattaggttcttcagtgccctttgtattatatttggacactgattacaaattcctttccaagctcaaggccaggagaaaaagtctctcctctgatgaacttatttctgttttttgtactctttctagaactagcgtggtctcttatgcaggacagatgagtgtaaaaagaatgagtggatggatgctctgctgtgtttcccagtggagcgtcctgactgcagaaagctatctatttttataaaacagtgagatacccctgggaacatctggcttatcatcaacagcttccttcaaggggggtaggatctcaaaactttaaaatgaagtgctcatcaacagtcatttcttgtctacaccctcctgaattatcaaaaagcaagcctttccggcgagaatctagtggcttttcttccatctgtgttcctgccctatccyytgttaaggctcttccccaaattaaccataacacgtattgtttaaggcattgccctcttgcctgcaggctctatcctcctctctctattttttttctttaggtacttctggcttttgcagacacttgctccctgagaattcagtggtgactttatgaattgtcctcagaaattctaaatctctgcggcaggatctagcctccagggacttgtcagagccagcagcttctgccagtgcgtgggctcgtctctgcagagggagatcaacctgaaaagatctgtttctgaaatatatgtgggtgaccaagggacggggtgcaggggaattctgaaggctyaggggaaggtcaggtgggtttcagcagtgagagacttgacctgcacagcatctgttatccccatgagccttcatgaccagtatctttggagttttgtctatagctgaaagatttcctctagaaattttgttgattttaacctgtttgcatagaatttttttctgaaatactttgcacattaccatgctgtcttaccccaagaatgatctacgaagggactttatttatctttatatctagtgtgaactctgagatataatagtaggtgcccaataaacattgttgagtgaaaaattactgatttcattagaaaaataattctgattatttcttattgcagtgtcgaaactttagaaaataaaggtaatccaaaagtagggattccctgttggggaaaggaaggactgaaagccagggacctctgatggatacaagcacagcctgcctcctagctccagcacagcctctgcacaatgggagcttcgtcttaatgcttgtaaaatgtcatctcattagcatgttttgtgtttttatgtgatgacttccttgttagtgtttaatcactgttctggaattttaaaaagtcaagattattaattaaaaaaattaatacatataataaaatacactattttaaatgcagagttcgatgagttttgacaaatgtgtataccatgtcgtctctgtctgaatgaagatgagaacatttccatcactttgggaagttcctcatgcccctttgcagacagtgttcctcctctttactccaggtacccactgatctgacttccatcagtgtggattggttttgctgattctagaacttcctatgaatggagtcatttttttctcatcaacatttggtctaggattcacccatatttcaactgagttttgaatactgcgaaagggttacacaagcagaggaagtgtgagggcattgcacagatggagataaaaagatcagagggagttccgaagaccagaattagtttagagtgtcctaggcatgcagtctgagggggcagtggcaggagaagagcctaatgtggttgaaatagtggacagtgttgaattttacctgagccctgtactcttggaaaacagtgtggtctagaattttgaaaaatgcaaaggaaataaactttgggagtgagagaacaggggatgttgattgatttccattatcgtatcacccaggggaaaaccccagcagatatctgtgctgacttccttgggtgaccaaatcatttctgggaacttagggttgttgtcagcattggtgatggttctggggcacaaacatgctctcagccctgttgaccatttccccctgatctaaatgctgaagacagctgtgcctcttatgttcttgagtctttttttttttttttttttttggcagagtcttgctatgtcacccaggctggaatgcagtggcatggtcttggctcactgagacctctgcgtcccgggttcaagcgattttcctgcctcagcctcctgagtagctgggattacaggcatgtgccactacacctggctaatttttgtatttttagtagagacagggtttcaccatgttggccaggctggtttcaaactcctgacctcaagtgatccacccgcctcggcctcccaaagtgctgggattacaggcatgagccactgcgcccggccttgagtctgtttttaacagtgataccgtctattgctgccttgtggtcccctcttccagtttgtgtttttccttagttgaccttgctggtctcttggttttgttcttccatgtttgcagtggactgtaatgatcggaaaaccatgttctagaacgtccctgagagggtcttgagtgtggtctggaggggattccctggagtactagtgcacagtttcctctcgctacgcatcaggtcgggggagttgaatggtgagcctggagtccaggcagggtgcggtattgcttactgcttttcatgagtggtgttccccagaatctgtggttgaggtcaatktcagctgtttgtcatttccttgttagagcctgatgtaaagttgaggaaacgtgtgtggtctcatcgtggatagaataggggcctggcctgtcgtgaattctgtcaccttgctcagtctcttcacatctttagtcctgataatcccgtctgtataatagattccataatgctgatgaatctggtgaaatctgtttttgttgcttagctggggmaaaaaaagttcttggtgtgaggaatttctcctttgttgtgactgtggttctcattgcattcccctcctcccctcctcacttccttctctgcttaccgttggatttctttttggtaggagctggtggtgatgggtgctccagggtcattttattgggctggaaccatcaaagtgctgaaccttacggacaacacctatttaaaactgaacgacgaagtgatcatgaacaggcggtacacctacctgggtgagtactcagggagagaacaggtaagaaaggggaaatgggagtgattcccaccagattcacaaattattgcttcattgttggaaagaggagttagttggctttgacgcctgttgttctaatgacttacatctttagccagggcatcttcacatctagctccacaaacacaaggtagagaggaaaaccaaggagggaactgaattaaaactgtatgctttaattaaaaagctgacagttgaacctccagggaaataaacattttattttctcattttatcaattgttgaagttcagatggtcaggtagaaatgagtgtgatggagtcttgattttccacgggcgtccctttggatggagtccttgctttctgatcacaaaactggtagcaaatagaaagataagaactagaaattatcatgacagatggcaacctaatgctgaaggttaattaaaggctcagaaaaatttctcttgctttcttaactcttttaatcttctggaaagaagatagacacaatttaatgtagctatcaggcagaatgacactgggacaaggtccatgccaatttaagaacagacataggctgtctttgcttgtgtagatgacaattacaagactcttttctttaatttatgccctaaatgctataattctggattgaaagcgaagywaaatttaggaaggcctaatgatgacacacaatgctctttcgcactcatgatacataacttacagggaaaggccctgactccctttttgcatagcgtcactgggaacttcttgttaaayggggttagggagtcrttgacttgccttttcccttctaactacaagttttttgcctggtagcatagacccaacaatccttctactctggggtgtttgctcctgtaggcacccagctgcctagtgctgttgcttattaagcatttaccctatgccaggctgtatgtattatttctttttaatttctgaaacaaccttatgaagtagctattattatctacattttatagataaactgaggagcaaagaaattatacatcttgccaaggtcacatggctcctaagtagcaaaattagggtatgagcttgtggtttctgagtgcagagtctaaatgctgagctgccttccctgtgggtgcgtctgagagagcacctatcactggtactgtacttctcactgggctgggagcaccttgaagacaaaatgtgggattgtgtctcacatttggtatagtgcctggtgtatagtagtaactcaacacatatttattgaatcagggaatgaagagagagcagaagaaagcccagtttggatgatgggtttggggtctagaacagctcctttgaagcttcgagcctgtggtttctctttgtatacacattagaggctcttatcagctgcagggattatcaaggatccgttcaggctttgatctcactcagaatactcttaggtactatcagtcgccagtctgagagaaatcagccacatggtgaggaagaattgatcatgatatgatgtcatcgcgaaactcaaacaacttacaatcactttagggttagagggtgatgacaagtttggggattatatggcagcctgtacaggatttatgctggccagaggagagctttcagcctgctagcaaggctctcagaaagcaggagacgttgaggctaagcctaggcaatcttttcctttgtttctaggttccttttgcatccatattttttcactgaccaccctcccacccatccacccatccatctacccaaccatgcatctacccacccacccactgacagcttcttttgccttcttgtaggagggagtgtggttaacagcaggggctttagaggcacagattagatttgagtcttgctgtgtgatctttggcatgttgtttaacaggtttttctaattctgtatctgtaaaatggaagaaacagtcatgccttcttcataaagtttttagactgaaagagatacctaaagacatgcataaaaatgttggtagcaaccttgttcatattaaccccagcctggaaacaacctaaatgcccagcaacagaataaacatatgacatatttatataacggatattactcaataataaaaagaaactactactgtactcaacgatgtggatgaatgtcacagatgttatgttgagtgaagttcaagaaaaggcaaacctaatatatggtgatagaaatcagaatagtggctacctgtgtggggcatattgactgggaaagggcatgagggaaccctctggggttatggttctgtggttatagtcacttccttgatctgggtggtggttgcatggctacgctcatgtgtgcattcattgagttttacacgtcagatatatgaccttaccgtatgaaaactatgccttgaaaagaagaaaacagatatatagtatttcatacagtacttgtccgaaagaagacactcagaaagccctctttcctgccctgatatccttgtgaacatgactttttgtgagatgagagccatttcagcatgagaaggttgacagctgccatttttttcctggtagtttatgttccaagagtagggagcatgcttgagaaacattttcctctgatggatgtttttttttcccttcccttctttttcaaccgtgtgcttggtttccgcccatcctgttcaggctacgcagtgaccgctggccacttctctcacccgtccaccattgatgtggtaggaggtgccccacaggacaaaggcatcggcaaggtgaggagaaacatctgtggaatagctggggtcagacagaagaggggagcatgctgtccctggtgcagaggtttgccagctgacattgacctgaacattctactgggtggctggtggggaggtgatgaggaaccccctgactgccccactccattggaaagtttcccttgaaagctcaattagagtgtgagtatactcacactctcgatttcctgcacactctcatctgaggtttttcacagctgaccatgtgtgtgtgtgtaatttataagactgagccctggccttatggtgtccttcaaaagaatggcatttagtgctgtccaacttcaaatcccaaacccttcccaagtttggctttgatttaatggagctaggtccagtctcagatatctttgaggctttattcatgccccaaattattctcgtatttatttccccagtgtttgagaaggaacaytgggttcccaagactggttcagcccaaaggctggactggaaatatgtgggtctggctttccctaaactatagtatctgccaaaaaacccaccccctggatctagggctgcctgaattcctttgggaaacatgacctctgaggggcctgaattgtgaactacgcttgttggttctttatcatgaaggtacaggaaatccagattgagtaggtacagatggatcaggaacccacatttttaagaagctccataggttgtctgatgggaaagactgagtgaacagaggaatgaactttggatctggacctttaggggtagacctgtgatagagtctggtcatatctcccagggcttggagaagtggaatctggattctggattagcccagatgagctgagaccactggtaattggagccttcagccaggaggtcaggatgatcagggagctgacgaactttccagttgactaggcttgactaaggataatttctgtggatcctcctgggcagaggttaggagctgctgctcacgtttctggagcatgtgcctccctcctccctaacactgatgctgtggaaagaggttcttcaaaactgaaaccagataaaccagggccctgagctggcagggaggagggatcaagcaggtgaccttcgatcacctcaagaaagaggtggttctttctgagttgcatgaatttatctaagtagagaaagaagcactgagagctgttcacattgatgttgtcttcttggggaggggctgcgggctaccgggcatctctgtagaaatggtaaaaatgcctacgtctagttcacagtgatgcgggtgcctctatgctaatgatagcagctttcttttctccctaattgcagaaaacaygayccagttttatagtttttccttcagatgattgtgatgaacttcatagtccctgtcaagtcttaagatgacccctccgcaaacccctctcactggctatctggggggtgcaaggtataaagttaaaaagttgagaatggtacttataattgatagagccagacagcgggactcctggacccagtttataaagtacataaaaatgcttctttcaattagaccacctgagaggcatggggaaactggtcatagtgacaaagttgctgacaattccacattcccagggattggggctagtacagacttgattcccaaggacccctggccttcaggattttgctggatattctagtgtcagggcacaaaagcactcacactaagatggcagttccttatctcatgggaaggttatttacactggttctcatgagacactcttcccacgagatgtaatccaaaaaaaagaacttccatagtcaagtacatttaggaagttaaatgtcagtgatcgtctttgcagtggcgatgcatagttcacatgaacatgctaaaggctctaaaaagttccacagtcaaagaatttacttaatgtytaactccacattycccaaatgaaactcatttttacccaggcagatcacatgactctaatattacgtgaaatcactttgggaaactgctttgtctacagtactcatctccacctatccctttatcttctgttgtaatgcctggtaaagtcttactgggaataaagtccaatccataccaccaactaattttaaaaacaggaataaaggaaatatttcaagaaacaaaatactagctttttctcagagttgaattgtttacttgtaatttggaagcttcttgggtcttattgtgtgtggcttttataagtattgtggttcaggagcagtggaggtgatgtctgcctcaggattgaaggacccttttttttgcagggctggtaaaatgacagctgacttcttcatgatcatcagctagcataagcacatctgctgtgcacctggctcttaagcttttaaataggactcccaggagagtgctgataaatatctttgatcattgatttcatcctaactagattttttttttttcattccataggtttatattttcagagctgaccgaagatcaggcaccttaattaagatctttcaagcatcaggtaaaaaggtgaggttcttggtataagtgactattttttatttgagagatgtgatcatgtgggagtcagtactttttagaaaattggtttgaaggccctacctgtgccctgtgtttatatggcagtgctgtctgcttgttggtgtctttaccttctcagcggtatgtgtaatctgtacattcatgggattcatactcgctttaggagacattctgtagcaagatgagttatatggggccaagttacagcacagagttttaagagattgtccrtagttcagactgtcatcaaagtgactgcatgccctgtctctctgcctccatcctttctcaacgaatctccacctccagagagagcagatctttctgagtacaggtagcaataaatgcttctcactgagcctgtttcaccagcccaacattacccccttccctaatcctcagccctcaactgtcattgccaaggtgactgttgccacacaaagaaaatccaaacacaggttgcctgattcctcttagaaccttgaagcagaaatagctcagggtgctgccctaaagttagcctgggtgagattactctgcctgggtcctccccaccctgtccctaatcctctctctgctttctgaaagtttccattatactgccctgttgtctaaaattaagccaattagagagtcctgctattaataagcaacagttttcatgagcttatcagtcatgcacttcttgtgtggcttagatcagcaggactgtttggctgagcttggctactctaagggacacaagtttaggctgggagctgtgggggtaatttggaggtcttggtggaggccttagtgggatctgggaagaagcataggatgtctgggacatgggaggaggccatgtgcctccycaattctgttcctgccgagttagaactgctgtacgccagcctaggatccttccatgttgttctcccattcaagtagacctttttgcaattttaacwatccgaataggtacacttagtgtataattgtcattatcttttgaataaaaaatgcatcaccaaacttggttttgcatttttcctcagaatggctctgccttcccgagaactctgctggcttgtgttattttaacatttccaaaaccccaaagcaacagcactggaaaatgactgtgagccattctgcaaaagggttttccaagcacccttaaagttagaaaagaaataactctgtgctacttgtgatttacaaaagagagtttcaaagagcaagtagggtatgagtggaattaaggctaacattttagatcttctgcagaagataacaaatgggtgaatgtatctagcatggaaacaatctccctcttcccttcaaatgtacctgggtttgaaagcctaaaggtaaaggattcctttttttttttttttttgagacagagtctcactatggcatgatcttggttcactgtaacatctgcctcctggactcaagccatcctcctacctcagcctcccargtagctcggaccacagacatgtgccaccatgcccagcaaatttttgtatttttttttgtagagatggggtttcaccatgttgcccaggctggtctcagactcctgggctcaagggatccacccaccttggcctcccagagtgcgggatgataggcatgagccaccgcacctggccaaggattatttaaaatgaattgtggagtttctgagtatctttatgttcagttgtagctgtgcccccccaaactgcttttccttccctgccctactccttactgtctgtgccctggggaggtccggttaattcctattgccttcgagtaattaacaatctgtaattgtgccctctctcctccttgaaaacctcttggtttggatgagaacctatgctcaagttgatcaggtttttgggggtagatctgagagtgggtggtgcaaggaggatgagattaacctttgagaacccacttgtctaaacttcctgaagacttctgccattgagttccaggacaggttcaggcctgaatgtctgcttggatgtccttatcataccaagatacatcaggttccctgagaagggacagaaaggcccaggtattcaacttcttggcttcgtagccatttgactttttcttttctttagggctcttctggccctaacctttgcaccattccataggcaccccttctttctgccactcactcacagtcctcttgccttcacttccttctactagtgtctccaactagatttaccctgtcatcatcgttctgcttttgaaataggccatgacctttctttatacaacttattctacttcttgccagaagaaatgagacattcatgtctttctgacttctccattacctcctacaaaaggacatgaccccaggctttcaaaggatgcctttagatttatccctatgtccagagtyacatagacaggagggttctaactcagcaaaccaccggttcacttctgcttccgtttggctagaatttggtcagatagttctgtatcctggcttcctataagaagaaacaaagcaaaaagattaaaaaaacaaaaccaaacaaaaaaaacctggttcttgtctttattggttgactttctccaaatagtacacttaagaaatcaccaacatgtgtgcagttcagatgttaatacagacacacatctccacatttccaggctgatggggagctctgatcatcggacacacaccccaaagcatgtcattgccatattgaagttttattgaattaacggagtatgtgaagcatttgtatttcaaaactgagataggaaacttcacatatagagatttctaatttaacattgatgaagatgccaagttaaatagtcctttggaatgaaacaaatagttcccctggggctcagccagtgagcgcagccagcagcttggctctttgggtctttgcctgtgtcttactgatttcttttaccaaagctcagatggggagattggcaaggccactgaaatagtgactggcaactcggtttctttcctcctcaccctytgtgatttcaaccctttcctgctccgttctcctttgagaatgggtaatcagaggggaggaagatggccttggcatatcactggggaaggatttctgagcggccactacaaagccctcctgtgaccctgttagctgcaggaaatagattggagtgtcctctacctctctccctcaaactccctgggtcagctgccaacaaactccaacagtaaaagaaaaggcttgttcatgtccatcaacccaggggccttttattagaaaacatttattttaaaagaataatgctttttctctttcttttcttttcttttcttttcttttcttttcttttcttttcttttcttttcttttcttttctttctttctttctttctttctttctttctttctttctttctttctttccttccttccttccttccttccttccttccttccttccttccttctttcttttcttttcttttcttttcttttcttttcttttcttttcttttcttttcttttcttttcttttcttttctttctttctttcttctttcttttctttcttgacagagtcttgctctgttgcccaggctagagtgcagtggcatgatcttggctcactgcaacctccacctcccaggttcaagcgattctcctgcctcagcctcccttgtagctgggattacaggtgcctgccaccacgcctggctaatttttgtatttttagtagagatggggtttcaccatgttggccaggctggtctcgaactcctggccttgtgatccacccgcctcccaaagtgctgggagtacaggcgtgagtcaccatgcccggccttcttctttwatttttttttaaagtagaggttgcaaactgacagcctttggaaagaatacagcctacaaatacttttgtttggcttgcacagtatttgtttattgtttttacacacgaagaagttgcgagcatttaaaacactggcactttaaataaagttttaaatttttggcttcttttggaaaatggaaaggttgctcctctctgggtcagcattcctcttggtggcagttagctgcagctgggttgaagctgctcctttagccaggcttgtgggctccagtttgccacagtctccaccactccctattgttatgtagacaaggaagacaagtgtcacttgccacattaattttttttcttatgcctgttatatcacctgcctggatcctgttggtatttgggtttgagacccctaattaagctataattaaaagtcaatattatcttgctctgttccctcatcagttaaacagtcttaaaagttgtacctttttctgtcacttcagctcatgccttcctaaccaatctttcacctgtgcataggaccaggagagaataacctatttccccatgtaacatttattttcatgcctttcttgtgttgtgagatttcatattcctacttgcttggccttgtcaaatgtctgatataaggagcatttttattatggttgtaacataactttgtgtcctcagcttgcatttttaaaaacagcacctcattctgtgggcatcaatctatttatcttccccttgataggactccaggaatgggggactttgggccagttagctttgtctcacattgactggggccctgccttgctgctggaagttgggtatttcactctttgctaggcattctggtttagggggcagcatagccatccagcctctgagggatgtttctttttttttatgtttttattttttagtatacattaagttttagggtacatgtgcacaacgtgcaggtttgttacatatgtatacatgtgccatattgatgtgctgtacccattaactcgtcatttaacattaggtatatctcctaatgttatccctcccccctcccccaaccccacagcaggccctggtgtgtgatgttccccttcctgtgtccatgtgttctcattgttcaattcctctgagggatgtttctaaagccaatggggtggaggaaagcgagggcatccttgtgtgagagcagacactgaatgctttgttgcaactcaacttggttgcagatgggctcttacttcggctcctccttgtgcgcagttgacctgaatggggacggcctctctgacctgctggtgggggcccccatgttttctgagatcagggatgagggacaggtcactgtctacatcaacagaggaaatgtgagtacaatactgggcaatgtgcggatgggtgtsggggagggacatttgtccagccagcagtggccgagcacccctctgggccggcactgggggcaatgttacccagaggagatgaaaatatgtgatatctgtcttgaataagctcaatggcccattaatggaaagttatatacaatgttacaactgcagacacccaggggccaaggaagaatcttaataattgtcttttgagtgcttactatgtaccagggactcttcttcctgctttctgcgagagatttctatgcaatatacacatggtatcaagggtgcccatttttcaggtggaaaaactgaggcccagagaggttaggtaatgtgtcccaaaccacacagctaagaagtggggctgggatttgaacctaggcaagctggctttagagctggcatgctttgtctcaaggttatgccacctctctgggagcatatgcacattttcccagggaagcagaggaggacacaatggctggggaatcttgaagaaggagtaggagttagcagacaggcagggtgggctggagcagagctcccagtgcagagctgggcaagtgggttggggtgtgaggtggcatcaccactcatttcagcatgggggggcaggggactgcatgggaaccataatctttttgttcgtttgtttgttttgaggcaaagtatcactccatcacccaggctggagtgcagtgacgcagtcttggctcactgcaacctctgcctcctgggttcaaactcttctcctgcctcagcctccccagtaactgggattacaggcacttgccaccacacccggctaattttttgtgtgtttttagtagagatggggtttcaccatgttggccaggctggtctcaaactcctgatttcaagtgatctgccctacttggcctccctaggattacagacgtgagccaccacgcctggccaataatcttggtgtcccctattctgcagaaccatgaaagggacgtgacatggacagaaagatgcctctggccctctgtagctaatggagggtgggtgagtgggggctgggttgggggacagcagtgcatcgtggaagcaggagaccagtgagaaagcagtcttttcaggatctggaagtacaagtgttcaagtacaagtattcagcaagaacaacatggttcaatgaaaacattctggtgccgcctaccttttctctaacatgagaaaacgcttatggagataatcagtggaaaaatgggatgaaaactgcatgtacaaccagtcctcagaaatatgccaaatacatagaaaatgtgaataacagctctctggatagatgtttagttttatctttatccaaatagtgagaatataatttcatatttwaaaaaatcgaagtgtactgttaagcagtggctgagatgctaggtatcccagttgggagagggcagaggtttagctataactaagtgggcagatgccagaaaggaaggaagcagtgaaaggagagccagggattgttagagccttatgttgcgtctgaggttttcaggctcttcaggaagtcagatctaaaaccagggaggtttgggaggcccaggtgggaggatcacttgaagccaggagttcaagaccagcctggccaacatggtgaaaccctgtcyctactaaaaacacacaaaaaaattagcctggtgtggtggtgcttgcctgtggtcccagctgaggctgaggtgggaggattgtttgagcccaggaggtggaggctgcagtgagccgtgatcatgccactgtactccagcctgggtgacagagtgagaccttgtcaatcagttagtcaacaagccaacaagcaaggtgcagtggtggttgcytaggaggctgaggcgagaggatcccttgagcaccggagtttgaggtggtagtgagctatgattgcaccactgcactccagcctgggctacacaatgagactctgtctctaaaaaaaataaaatatctgggagggaaggtgcttattggtacctgttgcaggaactcttgkcacctgcatacccactgacattccaggaagtcagggcagggtgcagggagaaatgaaggggacattaaataaatgagtgctgtgggcattcagtggtgcctgccattgtatttgcaggagactgagacatttgtgtaggagtcaggtccaacagccagactgtgtgtctaaatcagaaggtggactcttgaagcacaagaactcccccaggcctccactgggcatgatgcacccacaccctcccctgccaaccagtgtttcttgatgttgtatggttattctaagtaccagagtattctcatttctgttgaacatcagccatttgaataaagatcggaaggcagtgtggagtagtggaaaaaattctgactttggagcaaggtggacctgagtttgaatcttggttttgccatgtcctagcctgtgtgatgtggacaaatggcttgaaattggtggcccaatttcctcatctgtaaagtgagaggcatcataagatcttccttatggagtcattgtgtgatttgaatgaggagctggctgtacagtacctggtacataggagcaatcagttgctggtgttcctctcctcttccccactacactgaaagaaagaaattaatgcatatttgtgttttggggtggaggtttcattcayccaagaaatcatctcaccttgactgttttcaaggtgtaaattgtgtttatagtgaaaaagaagacttggtcatgataaaagccagacactcgtgggatggcctgtaggatatagtgggcccagactgcctctgcactggggaatgcatacatcttctcatgtctcaggacatcagattgcattgtatcactctggtcttcatgtgtcagtgatttggggtgagagtaggtatgactttttcccccaagttagatgacttttcctgcctttgtacaccattaaccccctccctctgttggttagtattttctcaggaaattcatacctgagccatgcatgaataataggcacagtgacgtctgccatcacagccaccctctggccaagaacgactgggtgcttggattttctgaaccatgactccctctatcaagataactcatatatgcactttgcaaaacagttttataaacttgtaccaaaaggcacaggaragaaaaaatagaaaaatgtatacccttttaaaacaacattggggaaaaagtgctatgccttaaggacgtggagagcacatgggggaaaggtgggtagggaggtttgcttgtgtgtagtgtattaggacaaggcagagagtgtagtcattggctaccatgacattctccttccctcaaaaatgcatctcaggctatgggagaccatcctgctaagcaggtaaaagggackcattttgccagcaggagagagaagtttgggttcctgtaattctgcccaggtgtttcctgtcaatgagtgtgctctagcagggcagcattcaaactctggttttttattgatttttattgtttgttctgtttgtttttgttttgttttccattttctcctccatcctgtttcccagggagccctcgaggagcagctggctctgactggggatggtgcctacaatgcgcactttggagagagcattgccagcctggacgatctggacaatgatgggttcccaggtgagtgagtgctcctggtgcacggagcccctccaggtgcagcacgctgctctgtttcagaggggcagcctgctcgctgactgtccatctctagtggcatgctcctgggtctactgatccccttcgaaggcccatcaatgtgctgtggggagataggacacgtttagaggtgctctccctgtagacacgcagggctgagcttccagcccactggagttttgcctctgcataatcccttctcaccagctcagtgttctttgttgtttgcagtggaagcaaaccttggggctggtccatttgggacttcttatggcaagaagtttgaatagcttcatcctgccatcaactctccttgtttctgagcctttgatgctccatcatgctctaccatgttgatggggaaatgagtgaggagaraattagaaacccagacatcttctgcctgattatagcagcagctagattgacttttgagagtgtacgcktgtgtgtgtgtgtgtgtgtgtgtgtgtgtgtgtgtgtgtgtgtcttgggaggcatggaggcatatgtacctaatgyctaggtctgtttggacagcagtgttcctcacagcctcttggcctctctctctggcttgtttgagcctcttcacctcgctgcatacacagcatacagacgtcgggaggcagagcaaccatgtcaccagggcatgtggtggtggaggtggggcaacccttgcccaggccagccatccagacgtctttgatacctcctaccactggctacagtgggcttyattttcctcccccttggcctcacttctgcagacacatgactttgttagaagcaagggaaaaaagttaggaagatctaggttttgttctaggagttgccagtttgtgagagtaatgttatttcttgtgtgtgaagtgaatgcccttctgtatatttcctttatccaggaatggatttattatcaaataataataaggaatggtcctttatccaggacctcagactttctcagttacacaatagccattgtctatggaattctccctgatggaaattatggcacgtagtttatatttgcatttcttttattggatgggtcagtggtttttcttacgagcataaggtagaaacttttttggaactaaattcttctcagtcagcttctatagttttcactgkacttttttttttttttttttttttttttgagatggagtctcactctgtttcccaggctggagtccagtggcacaatctcagctcactgcaacctccgcttcccgggttcaagtgattctcttgcctcagcctccagagtagctgggacaacaggtgcgtgccaccacacccagctaatttttgtatttttagtagagctggggtttcactatgttggccaggctggtcttaaactcttgacctcaggcgacctgcccgccttggcctgccaaagtgctgggattacaggcgtgagccaccacactggcctacttttttttttttttttttccygctgagggatcttgtccccaaattaatgcttgaacaatcaacaaccaataatttctggtatccagggactcagacatrrcaaccagaattagggaagctgcacttgtattrttaatgtggctttttaacccatagctgtttttttaccctcagatgtggccattggtgcacccaaggaggatgacttcgcaggggcggtctatatctatcatggtgatgccrgtgggatagtccctcagtactcaatggtaattagtgtgagagtgatatggcaactgttcatacattcattcagcaaacatgtatggaaccttcattatgcaccatgccctggaggtacaaagaaaaacatttttcttgccttggccttcctacccttttgtgaaagatacaattaatattgcttattaaatactaaaaaaagcattcttagaatcccaagttcgctaacactcagggatgcattttgcctaaagaagataattttcaactcttactcagagttggagccatttatttaagaaaggaaaggaagctttctctttttggtgactactttgtcaaccgtctatgctaaggcaaaggaatatgttttaatatataatctagaagaaaaatggtccatggtggaggggcctgaaactgatcacagactgtcgtcccagctggcctcaaaaccaggagccagttaggactctgcgcttgcgccctatacttgggaacatggaagtggtgagttctgttttttgccgtatcagcttggtgttcaatcttgctgatggtgtcaagcccagcccatgggaaaaaaggaagtcatgctctcagcagaagcattgtcaggatatttgtggatgtctgcctgtggagtggcactggctctggtctttctcccagtgggtcagagacagaaggggacacacattgagaaatttccaatcaacaaatatttatttattgaacacttactacatgctgactacttcctactcatatgtatttgtattttaattttaagaggcagcaggtaaatgcaagtacaacttctacatgaataattgtccttggcagatagagataaactagttaagggtggagggttggttggttgtcattcgtgcctyagatcccctctctactggcctcctgctgagctcagtgcctcacctgcaggagacagggctttgggaggcgctgcgaagaggagggactgttttttgggtgcctactctgccctttctttacctttaatcctcgcagcagccatgtaagatgggtctgtttattatccaccatttatttatccacgaggcccaaggaggttatttaacttgcccaaggtcataagtggcagtatggccacagaatctttgccagtctgctgcctgaaacttgttatcgtaaccaccatcctcaactccacattgcaaaaaggaacgctcggaaactcagtaggaaaacttacgaatatggaaactattttgccatgaggcatacatagtctgaggggcatttatctatccagaccatcctcttttcattagaartacataacaggagattaataaacttcggtgattcagcccacaaggcaggaggaagagagctttgggcacagtttgggggccacatctgagtcacaagagctgccctaggctgcggcagggatgctcttcccagggtgacaagctaaaagtcacccaaggagccccgtgctcgggcagcggtcagggtcattctccacgcatcctccgggaagcttgttttcctggacctcggaagctaatcacacagtgaggcaacctgtgagagaccccagcttcccctcctccggggccctcccagtgttttgtttggttgctgggtggaatccctgtagagaaccacagtataactcttgtggttagcgtggagcgtctttagtgggaagcagggatagcatctggaccagcctgcctttgtcagcacgcaggctggctcctttgctttgacaaagagaagtggttttgggctcttaaggaaaaaaaaagaaagaagcaactatgactgtacgttcccaagctgctaatatgcatatgataagggcagagatttaaaagaaaaaaaattctttaatggcagattcttgcaggcccaggtcctggacagagcaggcattgtgtgggtgaactagaggaaggaatcagaaacaactctgggcaatggaatcactttgctttggcccagatttgtattatttctgctgggtaaattgtgagatcagggcctacacttcttccacattgctctttaactctctctcgagtttaccacggagagtgtttattttaagatccttgtgtgcctttcccaatgtgagagccctctgggcatatggcggcccctatgatccttctcttgctggaggggacactgcatagaaacctggtcaagtggaggtttccagggctcctggttttcatttagggttattagcactgggcagacttatcttcttggcttttagcataatggcctgcagatgtctgtgggataacttaagcctgcatcaccaccccagatggaccaccccttcgctctgcccctcgtcccagccacagcataccttagaaatgtagatccaggggcaggctgctgctagagttcttggacttcagagccaagagggtctgcttcaaaacgtggcttttaagaaatgtgcagacacacgtacatgtttgtktagacagagccatgtgggatgtagggctttgcctgttagtgtgaaacatttcttcagtgtttcctacagtgttctgatttgtactttggtgcttggacatttcctgttggatggcttaayggaggatggcaagcagccttctctgatcacttctaggagggttatttgcagttatcagctgctgggggtcagggggcatctctcgtgcctccatctgtagatcctgtgaaaactcccccctccttgccttcgtgacttctctgcaggatgactcgggaaagagaaggataaggaaagaaagtcaaagtgagcccctagatagctgtaaacctggttctattgtactttgaaaacaaagcatttctcttgtcctccacagtgaggrcatcaggaagtragcctcccctgggggaccatgcagataaaggcagaaggagtaggtcagaccccagaagatgggacttttctgattcaagaagttcagtatctttgtgaggaactgcgccacacgaatgttgatgcgcagcttcagtgtgacaaaggctgtttgtacaataaatattgttgaatcagtgctgcctgtgtggatatgtgatgaacttaatgatgaataagaagtgagcacagccaggagtggtggctgtaatcccagttccttgggaggctgaggcaggaacatcgtttgaggcttggagtttgaaaccaccttgggcaacatggcgagaccccgtctgacaaaaaaagtaaaacagctgggtatattggagcatgcctatagtcccagctacttgggaggctaaggcgggaggatcacttaagcccaggagtttgaggctgcagtgtgctatgattgtgccattgcattctagcctgggcaacagagcaagactctatctcttaaaaaaaaaaaaagagaaagttttttgtttttaaaaaacatataaagtaagcatagatgctagtgtgtcccatggtgaagttgtgaactctggttggttgagggggctgttttctagaggggagggcagggcatcttcttcagctgagtgcttttgatttcctacagtttaagaagtgttcaggaccatggagttctagatttactgggtaaaactgttcactcctgtctgtgaagctccagaatctatagatcatctggttggctggatggagaggtagtttccacatggccatcttttccagctggacatgttaattacctgtctgtctagggaaagactctgtaatgtgtgcctcttaggagcagagtgttaaatatttagtacatatttgggaagaaagatacaagctaaatatgttcttagaatttcagccagctacacctgtgtaaaaacaaacagaacctgcattaggaatggaagttaaactttatccattttgaatttcaacatgtcaaaacattatcatggtagtctaggtggatttttttcattaacacagaacttagaaaaaattttaaatgatgacgtttggccaagacaagtaataataaaggagtgtgtggycttcaactgcctgctaaagacttgctgatcacattaggattactttttttttttctttcaacaactttaasaccaagtgtcctagggaagctggaataaagcagtcacagttsttatttgtgactgtggtcttttcctgtgactccatttccctattatctgtttcagaaactgtctgggcagaagataaatccagtgctccggatgtttggtcagtccatatcgggaggcattgatatggatggaaatggctatcctggtaagctgtttttctttaaaggcacatgagataaatgaagataaatgcatgaagtagaataattttcagtctggttagcaatcatcacatccatttaggattaggacaattcacacaatagaatagggtgttttgcctggtgttcaattttaaggtgaaaataatgttgatatttattttggggttttaaactgatctactctgaatggcttagcaccaggagggtggatttgtgtagtggtttctggggcggtaattctaatgaagaaaaaaagcactggccacatctaaaatggttgaatagtgaaacctcatgttttcctttgtatttaaccacattcaaaggcttcttactcttgagagggaaaaagakcagcacccccaccgccccctgcccctactcttgaaataaaatgatggagaaagatttggagttaaaagaaaaccaagtcctcttgcgtgtggacaaagcagaccttcaccattcaatgctggctggcttggctttagagttaattattgcctgtggtggttgtggctaactggataaagatacatgatttcaaacccaaccccaagtgatatctggcctaggtcaaattgcctgggtggtggagtagtggttcttcaggtgtttcaagatggagtggggtaaggtaaggaaacaacagtaagaatttgaaaaaatccagaatggtcatggaattcaggaaacatttctctaaattttatagtcatcttgcttttgagaaatatttctttccactaaaatttaagaaaactaacgcagtcttgtatgaggacaccacattgtgtawttttgtacagataggagttttggaaattcctcaagacaacagagccaggaggaagtaagggaatagaaagaagtcagtgttgaagcttttgtcccaagaaagacccttgtgggcctttttaagtttgagaaagcagttcttgttctggaaaatttgtggccatccccaaataataccttatatgggtttagcatttaatatgtacaaaatgcttccacatgcaatgtgcatctcgcagtgaccccagcaggtaagtaggatagggtgttttccccactttataaacaaggatgctgagactcattgtgaggggctgcccagagcctgcagtgcacggggatccatgcttcccagtggttcagctacttttctgtaaatgtgaggtgagcaaggtgttcacagttcacaatggatctgaatttctgatcttgtgtttttcataagggaaattgacaaattcatcaggttcttttatttttaaacatatagcaaatttaaagactattgaagaacaaaattgatacaacacccaagtggagaaattttaggaacactataattcatggatttgccatttgtttttccctaatgagggcatcatatagatgctcagtgcatttagtgatgtacagattcagaccctcttggactcagatacttggttctgtgaagtagtagtgggaaccccagggccagggatttatatggccgggttggggtggtagggagaaaggcatagaaccactggaagagtaagtacttcctaaattaaagttatttaggaataaacattaccagttaaaccagggtcttggtttatagcttaccaagtatttccatgaatttactgacttaaatatctgatttcatatatttaataaatatttactataaatctagtgggtacttaatgaatattatataatgactaataaatattttctgatttaaatgtaatgaaatattatcagcttttgaagaaggcccyggggataattatcttcattttacagacagggataccaygagatactcaggtcacatagagtgaggggtggagggtgacaattccatgttcttcagaacctagagcattttccaagagtcactgaattctaggtatgtctttctctaattcactgatgtgaaaagaagtataagccatatgtgtaatctaaaatattcctgtaattacataaaatgataaaaaaggtgaagttaattttattaatttttttagcccaatatagccaacatattatcatttcaacatataatcaatatgaaagttattagtgaggtagttaatggttttctgtactaggtctttgaaatgtggtgtgtagtttacactcacagcacctctcgactgagactagccacatttcaaggccccagtagcctgcgtagggattggctgccacgtcagagagtgtggcttccattcttacaagatcattgtatagcccagacagtggtcgtctgagggctctccggcctcaaggctgggtctccatccttgtgagcgcattcccagggcgcggttgtgtatgggcttcagcaagtttctgaacgctgtaaacttctcattttcagatgtcactgttggagccttcatgtccgacagcgtggttcttctcaggtgagaggccccactcttgctccttgaattgtgctgttcagggtgagggatggagccattcaccattyatgggctctttcctctgtcctgttccttgtaggctggaggtgcttagtaagtggaaatgctaccttattttctcattctaattattctctatcccagagtttctagctgtggccttgaatggcttgcaggtatgagatgataacatcctgggagcttctaggtaggggttggggtagcctaactcttaagcctaaggtaggggttggggtagcctaactcttaagcctaactcttaagctatttgcttttggccaagaaccttccrtaatgtgccataaaaatattttataatttcctgcgggtgctgggaagcactgttcattctgtctcttcatctgtacaccctgcatttgtacctccagtcagtccacaacaccctggggaccgggagcctcctgcccgttagacagcacgtcattccctgttggctgcagaggtgagggacatgagctgaggcccagagcttgctgaggcccgtgcagtctgcatctctcctgcaaaggccagtgggccgccgccaccacccgtgaaccctctccaagtatttctagctgtatgagtcagaggaggcagaattacactttggagtgggagccaattcttaggttttgttaataacctgatggcagaactttctaaaatagactaataggatctcagagctggaagggatcccagaggccatgtagttccacaccccagatccttcttattcagcggtaccttctgctggtctccactgcagggctacacagcctcctgtttgagtgagatgccccatgagtgggagcccagttacttctaagggaaccagcttgccccgggtaacattaaatcttgaattattaaagaggcagaagagccttgaggttgaatgtgaactcaggggccaggtggcygggttccagccctgactctgcccttactaggtgagtttcctgggcaagtcccctgacctttctgtttcaggattctcctctgttggccaggacagcaatacagatgctccttgacttaggatggggttatttccagataaatccattctaagtcaaaacatggtagtttcaacttaggatgggtttatccagatgtagcctcatggtaagtcaaggagtgtgctgcattcctatggcttttgcaccgttgtgaagttgaaaaatcataagttaaaccattataagtcggggactatctgcagtacatgtaaaatgttcagaacagtgcctggtttaactgcttaataaatcttagcaagtttgatgtaaattgggttaaatttgcctccctaaaattctgcttctcagtcttgtgtcttttatrtagcaaccctttagtatctgaagggggcaattgtgtcccccaagtggtgacttcactaagataaggcctccctggttcctgtaattatttcccatgtgactggattttcactttctttatcagcgcttcctctggataaaacagcttttgtggctccaaatgattgaggttagatttgtgaatctggttgctctagttggtgctttcatgatgtcatctttgctctcttcattatcctgagcatcttactttggtttgtcaggattcttctcaaataaaacacactcctcaacttttacagttgaaaacaggctttttttttttcttcttttctttttttgagatggagtcttgctctgtcacccgggctggagtgcaatggtgtratctcagctcaccacaacctccgcctcctgggttcaagtgattctcctgcctcagcctcctgagcagctgggatcacaggtgcacaccaccacacctggctaattttttaatatttttagtagagacaggtttcaccatgttgatcaggctggtctcgaactcctgacctcgtgatcygcccacctcagcctcccaaagtgctgggattacaggcgtgagccattgcgcctgacccaacaggccctcttaaaaccggggccatctggctgaaggtccatcatatagactctgctttctcatcattcttgtrttttttaatcttcctgctgtgagcttaatccaaagggtattttctttttctcttcttcatggtgagggacagccttctccaggagtttgctcacatatggatgtaaagtaaagcgaggcagttacacaatgggtgggagaccccagactccagcctaggatggagggttgaatctggtgagttggagctcaacagggacaaatgtaaagttcttcaagaagaactccagggagagcacatatcaagagaagagacctaggagaggagcctggggagccctgccctgaataagagcatggaaggcccaagaagagtggtcgggccatgacagctgtagagtagcatgcaaggatgttgtggtcacaataatccattatcttattcattcagctaaggtgcattgacctgttgagatgcagccatgcatcagatcctggggatttgatgggaaacctgacctagcctgtgaccttagattatagccagagagccatatgcaagtgaataataatgcaaccaatgtttggtaagctcctaccgcatgcctggcacagtgtgagcacttcatttgtgttcattctttgttattgttttctttctgtattaaggtagaatttgcatgcaataaaatgcaccaatttgagagtatgactccatgagttttgaccactgcatacgctgtgtgactaccaccccaccacaataaagaatacttctgtcaccccagakagtttccttgtgcctctgkctggtcatacccctctcctgatagacaaccactgttctgacttctatcaccatagatccatcttgcccatkctagaatttcacattggtgggaatatacagtatggactcttgtttctggcctcttttaatcagtgtgatgcatttgagattcgttcatgttggtgtgttgcttgtttttccccttactgagtagcactccattgactgaatatccttgagtttgttcatccatcctcttgttgacagaacacatgacaactcttagtcttcttaacaatccatgacataagtggggctgttatccccattttatgggtgaggagaccaaggacatgcagatcttattaatataaaagggaaggtgattccagatggtggtaggtgctgtgaggattctaaggcagggttacttggtcaggcartggtgtcaaagtcagcaggaagggccaagcagagtgaggcctgagacttgttggaggtggcagggggaggtcaggggtgcccttggctgtggtggctctagagaagtgatggggcaaaagccagatggcagtgggtgggtgagagaagaaacaagaaggacagtgactcttgactgcttctccagaagcttggctgcaaaggagcaaatgggaccagcaggtagttcagggaggtgttttaaggacgggaagctctagatcagtgattaggccaagaacgtctttgagccattttctggtctcccaagtcccttaccctcttggaagagatcagaggtggtcaccctcagcttcrccctcatctatgtgaaccctgatgccctaaccctgtgcctacacccaagggtcctggagaggttgaagagacaagagggaggatgggaggctgctccagrgatgagggatggggggatgaggttggtgagagtgatggaatctggtacatgggctgggggcgaggggccctcatcttctgagccaggccccaagataggaataaggtcagagcaaggttcagttccggtacatgggctgggggcgaggggctctcatcttctgagccaggccccaagataggaataaggtcagggcgaggttcagtttgggatgtggatgaggatgaagcagagggtgaccaccctggtctattccaggaggacaagggaatcagggagagcagggaaggcttcaaagacaggctggagcccctaagagaggaagcaaggtggggcaggcaaaggggttgctgagcatgtctgaggggccagcaggctggatgtctgcaggggcagccgttgataaagtcccaggattcagctgagcagcagtgaaggcctggaggcatcagctggctatgttaagtaggggcttggctcagcctggcctaactgatgttagattttgagttactttaggttttgggtgggactagaaaagcagggagrgctaggagaccacgcatgtgcaagcacacatagatatrtattgcccatcgttcctaaccctcctaagggcaggaggccagaggtatgtgggttaggaatgctatgggctgcagctaagagaaaacctggctgaggctttcaactatatgacctcaaattagctccctggagrtaggtggccccagggctggcttagtaacctaacaatggcaccagtggcaccaggggtgaaggctctttatctgtccttgccttgcagaaggccaaggcaccttgagcaacatgtcaaagggcatcccaactggttgtattatttaccttgaagtgaagtgwcrggatttgaactgtcagccctcagggagaagtgttccagctmccaggttttttttttttttttttttttttttttttttttttttttttttttttttttgagacggagtctcccgctgtcaccaaggctggagtgcagtggcgcgatcttggctcactgcaagctctgcctcccgggttcacgtcattcttctgcctcagcctcccaagtagctgggactacaggtgcccgccaccacacccagctaattttttgtatttttagtagagacagggtttcaccgtgttagccagtatggtctcgatctcctgaccttgtgatccacccgcctcagcctcccaaagtgctgggattacaggcgtgagccaccgcgcccggccgctaccagcttcttaagaaaaaaaaagcactgaaagcrcttgtgrtgctgtccttgggtgctcctttgcttttatctcagaggctggcacatttgtaggcaggactgtgagacrcagtctcccctgcccccaggagtgtggctggcccrctctgccctcaggaagtttgcttccctcagattagctccggggcaggtcctgtgtcagggtgatargcacacggtgctctcccattgaaggtcacaggaagcgatcagagaggcctctgaaagatttctgggcttttcttcatccaaaaacaatacttggagttgaaacaaaaaggttgaagggaactgatccgacagctgtgggaaggagatgtacctgtgaaggtccctgtggtccatttcaaaggatactgtttttccaacttccactgaggtcactgtgtctgggctgcccacgtctgtttcctgcctgccgcactgtcttctgcagagctcttttgtgagaggaggattcggcctcctccctgacgaggtggcccctggggatgatggggcgggctaggcttttcttctgtaccatgaccaggcgcgtcagggaccaggcaaggtggagaccagctcttcatggtacttctgtccatctgtgaggctttggacactcgtggttttcagtctcctaggctggagtaaaatttgtayttatttaacaagggtgtttgcacatttattatgggaacgagaggatgaattcaccggatcccagcccttgcagggtgctgcaggatggtggggcaggtttggaaatagacaatgactgttcaccttagtaagtgggggccagaggtgtgtgtacagagctggaagcacagagagggaggatgcctgtcaggggtactagagaaggcttcctcagggtgggaacatttgagctggctgttgaaaggtcgacggggttttatagggtgtccattggcatctgcacaatcacactggccaggggtaagagatccactttccgatttatttctagtatcctataaggatgaacccagaagaaaatggaaagactaaggtgttggccttctttcaggcactgctattgtctgacttccgtttgtcctgtggccagatttgctctggaagtcccgcagttccactgcmtctgttatcactactctctgttgaccccatctcccagcatggtggcagcagtggagtcccctcaccctatctgtgcctcgtgtctcttcacttcctttgttcacccagattttccttaacgctttcttccattggagttggtgtgggtcatcattcccatccgccctatcaccctgggctctctttgagggatcattgtacacaggggcatcattgttctcaagctactaatgccccttaatcttgttatgtcaccccagtggtgtgaaggccagggctccttagaggtaaaagggtctctttgtgaggcctggaggggagaaggttgagcrgtagcttaggtgaatgctgcctgagcagatgtctgcagtgggagcagaatggtgtgatttactctttgtttttgtgggatgtccttggggagcccaaggactgtccattcatcaagcactgggagatggtccatggcagggaggagagtatggctwtttattgagtttcatttggtcataagactgggcaggttgatttcttctgccctgaagcactttgctattaccagctgggactccacttatcaagttcttttaggaaattacccaatgaattggtggaggtaaatgatgcaggaggtttgaccaactgsatggggctacaacattgcagttcatgctcataatggcagcaaatgcttgagggaatccctgagtatgcatctatttcttgaatcatggcatctgctmtaggaaatcctcttaaatgtattcttatctccctaataawatggaaattgrtacttaattggtaaaattttaaataattacccagcatctggtggttcatttatggcttcaaccagatgcgttttattaacaacaaacttgcttttattattgggacgctaactattaatttactaggcaatatgccccttctaaaaccagaaaaaaatgctcacagaacatactagcccttctctcttgggatatttcatgctttaattaaatgctgggttgaaggcctaggatttatcctgttggtctagttcttgtttggttctgagagctgctccttaccacgactaagtcaccttcctctcttgccctgcagagcaaggcctgtcattacggtggatgtctccatcttcctcccgggctccatcaacatcacagcgcctcagtgtcacgacggacagcagcctgtgaactgcctgaacgtcaccacctgcttcagcttccatggcaaacacgttccagragagattggtaatgagccaccaagtcagggctcaggatacccgtttagctggagtgggctagtgggatatttccgatgttccctgtcrctgttcctcccagctggttttgcaggcagcaggcacacaggctggacatcctttccctctgaggttcctccccttctatttcctgcttatcaacatgtttctaatgtcacacaacctccagctctaggacaaataatgttggaccccaagcattstttttgcaaatatgagggctagactgaagcctcattkgaccacaggtcctatgggactggtggagatatagtgccyggagcctggcccttagggaacattcgagcagttagaaagcagaagtgacaggactttggaggctccttattgagcttgtagcatcagccagatgtcaggggacttataccatttactatggaattggagaccaaagatggatggtgggattcggatgctggtgttacagaggcttaggtttctaaaagaggggtgctgctttggcagctcagaattgaaaagaggcaggcattgtcctgacagctggtaactgtccctgccatttktctggctggggaaaatcaacttgctagcccagctctagagactggattaaaccccagaacaagatagaaccagtgttgattggaattcagagcacgtgatcacctgaaggaaatgaatctggagctttatgcatattactaggtgcttcatttttatttaaaaggctgatttaataatagaaagaaaaactccaggcaaacaaaaacactaacggacctgaacctactgacgttcttagatattttkaatgtcatgagtgactccttttgctactcacagtgtagcccctggcctagcattgtcagcatcactgggaacttgttagaaatgcaggactttgggctccgctttggacttctgaatcagaatctkcattttcacaagagccccacaagattcctgtgcacatttaagtttgagaagcactgctstggagcacacatgtgtgcacacacgcccactcatgcagaaatatttacgtgagctagttcattcctcagccacacctcaaatgttctaccttatttaatatgttcatccttcttggctgtctcattggcaatttctcttgatcttcaggtatattgaataagctcaackattaaacatatttattttatcattttttaaaaagagcttagaaatttcaacattgaatgaaaccataccataaaacttgggaactggttagtgagggaggattaacaacattttcttgtgcagctcaatgagaaagagcagctcactcaagatcacacagatattgttgaagccaggagttgaatttggatcttatgatacttagttttgctttctaacaactatttctcaccacctccataattgtttaagatactacagtcttaaggaaaaaagctttctgatagttctgggactcgtgtgtcctccacataattaagcagtctgtcttctgtccagtgccagctcatcacgtagttggactctgttaaaaaacatttttaaagaatgaagattaattttgatacacataagaatgagaactattctagaactctcaaaaagggcaaacgagtaatagtktctgtgtatgttcatttgacacrtgcttattatgtatccacatgtgccaggcactggagatatagtcctgccctcatggagcttctaaagggagttacaaagagtttctactattttggccttgaagcagtgttagacaacgttcacttatcgctgttgtgaaagtgaaggtaaattggcatagctgaagcagagaagaagaaaccaagatgcaagttagagcaagagtgattcagagcatgagacaagtggtagagcaaactctgatttgaaggttcatgagctgagcgcagaggagatgtgggtgcctcctcatgctgttcccgaccagtggctctttctggggccccatctagcatgagcctttcacagactgctaagcayaattagaatgaaggtctaggcttagccatagccccagaagtgttggggtaaagtggaagaggcyggcagttggatggcatcttgtactgtaccttgtgggcaatgcgaagcaacctggcttatatctgacattaggtggggcccattcagcaccagtgtaccctcccattaatttctcttccctatcctccatctgccacatgggttcatagataaagtcaaacatccctttayactctaagggtgtgtttccccgataatcaggcttaaaggggatggtaactggagaattttgatatctcartataataaggcaatgcagaaaattattcatccccagcatgtttctgtcactttctctggcattcatatctcaatctttgcagtagaaagagaaatgtagaaatctgccagaaaatgtgctggcagtgaaatggagagtttggggagggaaaaatgggcaggccttatggwaatgtgataggaaatgaggtggaggtgaaaggtcaggtaactgtgggggcccagctctgggtgaggtgtcctagaattcagcaaggaaggcagcctcttggctctgcacagttkggaaggtcagtcttcagatggaggaaagatgggcacttccaggacacagataccctccactyccatccaagctcagcagagggtgctggccaactctgtcatytccaggcctcygcctcaggaacccacagctgagacactgggttaccagccttcctactctttgtgctggcagctgcagaggaaccatgtggatgatgactttgtccatggaatgcctggtgaatgagtgccagccctgggcaggccttccaggcacctctcaatgtctgcatatcttgggctgagtttgttakyargacggctgcatttgggcagagcaatacacagatacctgtggtgggctaggtactgctgtcagaagtggtatcttctgtggtatttatctgctgctgtcttcagctacatgacctgctctctgaggatggttttgagagccataagcagctgatgttagtcttgtgcctttggtttcttcttctctacctggcagggttcaagcctatgtacagagaagggacaccaactgcctctttatttcctgctttagaaatgggagaccacagtgcctacttggtcatgggagtgttcaggaccagctcattagcgggacacaagctgctgtagcctctgtaaatactgtaggaaatacagactttctctgtaggaggtgaatctgccttgscctctgaaacaggcagagtccagtcaggaaaacaaaaaccataccagttattttaacagaggaaatttagcactgggaatgggttaaacaggtcatggacgacctgggagtaactgcaggaagcagctgccgcctccaggtctgcaccagtggatctcaaagtgtggtcccagaccagctgcattagcatcacctgggatctcattagatatgcaaattctgactagaaactctgaaggtgggacccacatctgtgtttttacaagcctccagatgggttcaatttgagaaccactgttcaaggttatacttcgggttaaccacttccttggggttatcagaacctatgagcttggagaaggggccctgcggagctaggacctgaacctctgaggaggrggctggtgctgctgatctctctgagggagtgcaatgaggctggctctgggagaatggggggaaaattgaaaactacaattaactgctgttggggccagctgccgtgagaaactgttgctgggataagctgctaggaataggaagcagggaggaaggagcgagttcctttgccctytccagccttgcaggctccctcygatgctccatattagcagagcckcacagcragcctctggcaaaacaagtgaggtttgcagggtcccagctccagtgtcacagtgcagggtagagaagggtgggttggagctgaggacaacagcttcataaaccagcacagcaagcatccagttacattgagttgctgaatccctgttgggtcattcaatcaaacaataataattaaggtcctacagagtgccagacaccctgcttatcctggggcacggagcagtgagcaggacaggcaaagtccttgccctcatggagctggcattctagtgggaggggggcaggcagacgggacaaaaacaaccagctgctctcttgctggcttttctagatgagctccgggccccttgtgtggcatgcactgtgcttagcactgggacacagacagacacagacttctcactccgactgtgggctcctccaggagmrggtttacaacgtatttcataaagcactttaaaataggagttcttcctgtccctaatagtattattcatcacttcattcttggcctgggaacagcctgtggccccttggagcctcctggctagcataggtgaaggtggtgaatgctttgcccaaggggaccctgcccctcacccrtggacggtgcttgtacctactcactggccaggctgaagcctaaacttgcttgtcaatctctggaggctgggaatcaagctggcagttctgggctttcaccagagtgtgaaacgaaaaccaggaaggggcgctctctgagtgattgcattttgcactcwgacccagtgctcctgtgtttccatggttagcctgaaactcgggaaggagaatttgttagaatttcacagctgaaatcttgttctgacrgagagcaggaattaatcaaaacttgctgggagagaccagagctagagttgatgagagacagctggctccctcctggcccaggcccgtgcaggggggctcctcgggaagcagccgggggcagggcagggaggtggctgaaagtattactcggggctgatcagcttttccatcaccatgacatcattcgacatggcagggacacaagctgccagaaggaaaaacctaaagatgtgaaatgtgctgttggagcaggccctaatcagaactagcagcctcccagggacagacaggggctggccaggctggcttacctcatggccggctgtgggcaacttggacagcctgatccacccaccttcccagggccctgaccgcggagcccgggcagctgatcggctgcttcccagacatgtcctctgcttccctttccaccagaccctttaccagtgggtgctggtaaaactgccagttccgctcagggctttggaatgagtggtcagcatttcttcttgcctcctcaggcagggtctctcgttgtgactcttgctttcttctagaggagacagtctgatgtagaagtaatttcctttggggtaatttaaaatgtcaaaatttaaatcaaggaaaagtactaattaggcagttctagagatgaaatgcttccagaatgattgcacttggtgaattggataatgcggtatgtctgtgattgtatgttttaacattttagagaaatctgaaagtttaatgtgctggcatgcacacaccccgctggagaggagcagcagttgccttgtcctcagctcagtttctgtgaactgtgggttgtttctctcttccttgagttgcaagagatcagtacttccggatcagtacttctgcagtgagatgaaactttggaggagtaaagttggtgtttgtaaattatctagcacagtgcttggcacacgttgcaggttgaatttatttgyttttccttacttaccctgtgttaatatgggttctccccaaaacagagcctgggtcaaggatctgagtgcatgtggttgatacacaaatgatcccaagaggtaccagtaaggaaatgggacagtgagacaggaaaggaaggcagttgcaggcctcaggcttctccagagaaacagaatggagagagaaagaaatggattagttggttgattttcaggaattgggttgtgagattatgaggtctgggaagtctgaattcttgggggcaggccagtaggctggagactcagggaagagttgatgttgcagctcaagtctgaaagcagtctaaaagcagtttatttttttgggaaccttagtctttttctcttaaaaccttcaacagatgaggcttgcccacattttggagggtaatctgctttattcaaagtctactgatttaaatgttaatctaatataaaaaaataccttctcagtgacatctagattggtgcttgaccagattctgggtactgtggcccagccaagttgacacataaaattagccatcagagcagccaaatagagggtgtcttaytgagcaggttaccactgtgggcagctggagctcagtcctgctggggaaccctggcagtcagtgtagaccgtgccccagaattaccccacatcaaggggcaagggagctggggmcctgcattatggagggctgctctggggacttgagttccctggcactcctggcttgccaggcacatggacagagccactagagaaagccctcaggagaagagatgcaggtactggcagttgcaatttgggccggacagcagagaaatggtaaaagccaagaggatatgggtgggggagcaataccatcmgttccatcttcctgtgttcctttccacccaggttttctctgagctcagctagttcatctctggtaagatagtccagtctcgctgttctctccattgtctcccttcctgagggaaggcagccattcacctgggaaggaggctggtcaggggaccccgaggagagtctgctcagcrgctgcctccaccacattggttcacccaactgtggcctctggcttgtcttccagcaatgtgtatctgtagccatgactttgcttaagcraacttggaaattcacttcatttaaatgtaatctttcttacttcagggcagttgttcagggaagttgtgatcagtagaaagtaaattggctagagttcagttgtagatctctgcacttgtttggacctgctatccatgcattcaaaaaaatgggaggttttggtcaagtaatgtacaacatgcagcaagaacaagtgtggtgggaakagcctggcaccagagattaagggagtcctagattcagctgtttgatgggtggccctctggcctggagcaagtcttgttcccttttggggcctcagttccctcatcttaaaaaatgaaggtttttgagcttagtggtctccaggattgcctcaaagctttgccagtctgaatctacccttttcttgctattgtccccattggarttggtgtgtgacacttgcacaggtgccagtgttttctgtgtgggagcactttcctgtatgcattattttcttcttaataatggcacctcctgagagtwtccaggtctcagatcccttctggtgacacagccttgccttgtaagtcaactgtttgctggcgttaaacaagttggggcagatggctctgctgactaggaatttgccagctcggcatggcaagatccctgagatggcagaggcccagggaggccattagaagcatcaaaaatacgccctgtggcaggtgcagaatgcccattcaggtcaccttcctctctgcctgttcatacctcccctggtggctgatcccattgatgtcattaaaagccggagccttccctaatgcctgacttcacttacttaaatgccagtgggctcggggctacttgttactgatgcaaagcccccagattctaagaggcaggtgtgtggagacagggcagggctgggtcatctgccttctgttgcttagccatcttgccttgtcattccagggacagagattcctgttctctcactttaaaaataacatatttccttgaatccccaaaacagttaaaaaataaaaagggttayggaggggatgacctctggcacagaaaagcagtaaaataggtgtattgacactgaagtcatatttctataatgaaatacatacctatctatttacttattgactctgaaataacagaggtagatccttccaggtttatctagcctgcatttgatactgtgatcatcttttttttccttctttctttcttcttttttttaaattcaagactgtgttacaaaagttctgccatctggcatacacattcaggtatgggggtgagttattctttgcaggagaggacctcagtacaggccctaccgtggtcatagttttgttgaaaggataggcactacaaaatgtttgatcaccacactcggctacctgggaataaaggcaactccagccttcatctgggttcctgtgcatgtaaactacctgaaggcaggagtttatgcctgcgttgttcattgatacatcccctctacctttagcggtgcctggcctatagttagtgctcagtaaacgatggcgggcacatggtctggtccatgtactgattatagagcacgactcaactttgttgagatgagttaaaattatcagacgagatggttcccttgtgttgggcataaaccatgtgctttatagaagtcagtattacacaaagccttgataatttcagcagcttctggtaatgttctgtaggtttgtcatgatgttttgcttgtcaggacactaacctgtgttgggtacaccttgttaatgggcatattgctggctcagttgatacctcatgatggcatgaggtttaaatcagggagagccgtgaagtatgacacaaggagagtcattagaaaggcagaggacatcatgcttctctctcgattctttgagcaccctggctgtgtgctgctttctgagcaagtctctgcttggggctgcagtctcctgccatggaagggtaggtatcatatgagatgtgcatgtgatcctgtgacaaggamaagaggtggcctcatcacagtgtgtcggtcctttctgacattttgacctctcatttattggcaggcctgaattatgttctgatggctgacgtggccaaaaaggagaagggccagatgcccagggtctactttgtgctgctgggagagaccatgggtcaggtcacagagaagctgcagctgacttacatggaggagacrtgtcgtcactaygtggcccatgtgaaggtcagtcctctcctcctttttatcctcaaactttgatctctgcagatgttcacttggagctggtggaaactatttttattatgtattatgtgtgctcttccaaaattttatttcacagggaggagcatatccatttcttcttttcttttaaagttggcctctgacagcccttttatttatcttactgtgttgatttcagcctttaaggggggtcgtggtggtctaggagaccagtgatggtccctggctttgacttgttcttttgagaggtttctcatcctctcccctctatgaggcttggtagcctttycagaggagagccttggaagcatgtgcctctgggtctgcagtgatgctggatcacactgcacctgatgcctttctcagtggtctactacaaattagctcatggtcacagttaaggcattttaaaactggttggactagattcttcccccttgactactttctatttattttaggatgcattttttggcaacctttcccctcgcactctaaataaacttgcaaatgtttttctcctcttgaaattgtttgttaaatacactttgctgctaattcaggaggccaggctttgattagctacagagtggcccttgcagcaggcgctggcagggtggaagacctggcagtgcctgatgctgcaggaatggccagacactgacccatgggcagggtcagagagcggaggaggtggaakaatgcacttaatccaggccacatggtgggtggaatgagcatgggttttggagacacatagatccagtgtgtatccagctggacacataattgtgacctctccctgtctcagtctctgcatctctaaaatggacacagtagtccttaccttgaaaggtggtcatcaggattaaacattacacaatgaatttacttaaaggaccttgaatggtgtctgataaatagaaagcaaccaaattattattatttggttgggctgtatataattgccaatattctttttgacttacaaaaatggaaatttcatatagctcaacccaatattgtttattagccactggatttctgactgatagtttgaaaagtctgcagattagagatgaagtgtcctcctgttagtgccagagcagaagaataacagctgcttctagatgcttcagggctgtgtatagagagatgccccacacacccatggcccagagcccatgagtccatgcccctcagatgcttctcagtggggctgggctgtgtcttctgccaggactcctgcaggggcctgcccagaccagctgcctgagggcttgggatgctggccatttataaagctgctcctgtgcctgttaagccatacagccccgccccgtcagtcttagattacattggcttgttggtgcctttggtggggtgtgaggctgcgcagtacaggctcgtatgcaaacactgtcaggcctttgaatgcctgtgattggtgtttttatacctgctggggacagggcatcttctctcgggcctcttcttgctaggtctgttcacaaaacctttcctttaggtttctttgcagcttcttgctttggctgagaagttatcctttgttcctagttaccaagggtactggctatgagatgccacgtagagtggcaatagtgaagtgcaggccagaggmagggctgtttctatggtggccctgagggttactgggaaggatcagggttgcgcaaggggttggtcctgctactttctgatatctagggttgccagacttagcaaataaaactatagaactcctaattaaatctgaatttcagatcaccaatgaataattttttagtatgagtgtgtcccaaatattgcatgggatatacttatactaaaaacattttgctgtttatctgaaatttaaatttaacttggcatcctgttggcagattcaactctgctgatcttcctctacccaacaagtggcatttcttcactcaagcaaaacctggctgccaagaagagagattgagatgatggttagaagagtttggaggctgagctcagggctctcgagtgcagatccagcacagaccttgacgtgattattttggtcattctagggagagcaaaagagcaggcctgcttcagtgaattgggacctagagtcatttggatacagtggttgcttggccattttctcatgcaaggaggtgggagcggagaaatacaccagatagacacatgtctctgagacctttatggttcaagaggcaacattgttgccaaggtacactcaaggtggctgatactttatagccatactttataaccatgagaatgtttatttctggcagttactgtctgggctgtagcagaggactgggcaaatggcagagtgcacccgtaggatgagtgctaatggcctagctagctgtccacagaggaggcagcaggcaccgccccggcttactggctgtgggaacacagctatggaagctgaggcaggaagcaaggatgaggggaaggggagtggcagccgggccacctcctggagcaggaactggggcctggggggtgttggtcaggggtcaagagcaggatgcagtctctactgcaagtggagctttctcagtggagctggctctcggctttatggacaaatcaaagaagataaataaaagcattctggcttatcacacaccatatggctagcagacagtggggccagcatgaggggctgggcctgctttgtttaggctatctttaggtatttttttctttttttctttaagcctattccaatctttttttttctccctctccttttccctggaagttttcttgccatatatggtgataagtgactttatcatggaagaccgcacaggctaacacctgttttccaggctaactgtcttgtaccagactttgttccattcaccgtattggagggcacctccggagggtataggattttgtgataaggcacatcctcctgaggggagggcaggtactttctcacrgcctcactgtggtcagcagagctgaggcagctccagccacttccttggcttctctgcctcagagttcacacaccccggcttatcttccctcttccccgagaccagcccagttttggggatggggcccctcccactagccagtcaggctggaggcctctggtggatctcacagtcacaggcgaaagcccaacacctcccctcagcatcgggctctccatgccctgcctgaccttacctttctagacccatcttctgccaccacatcccctgggccccagctcttgtcatgacctgcccctttcctcctggaacctgctccttacacttctttgccttggttcttatgctcacagaagtcagaggccyggtttgtgtcatattcatgtagaaccatctaccacctgcatgatttttacatttttttggtcttaaactcatactgcctgtgatattttctttcatatttttctctttaaatcagccaacttttggtctcaaataaaataatttaaaacagaaactttgtacctttctataagcagaaaaccatctaacatgtccccaaaacagaaagtaactgtaaaaataaatatattgaagacacaacagtgtcctagaattctagctggatttcattgtttgtcaaagttgctgataaagcgcccactccattcatgtgttagaaagggaaatgatcaagttctagggaaggcttaaagacatactagcaccgcgctggaactttcttcctgatgcaaccagaaggactgcaggggaattgactgggaacaacttttcaaatatgagagttgttttacagagtcatgcctatgtgccatggaaatccaccttgtgggcccagtctgggaagccctggccatgctctgctttgatcagatgtgccttgccccatcctgcctgctgaaggcttgctgttgttcaaggctcagtccacaggttttggacatcctcagtggcagctactgtcctaggccctggggatgccactgtcatcttcctgacttcttggagcttgttccatgctgcctgactcctgctttggggatacttgtcaggcagaaccttgttggagtgactaattgggttagctggagtgtggggtcacaaaggcttctgatatggagtggggcctgcttgcctctgtctggactgactgctgggaagtgatggcttgagatgatggagaagagaatttgggatgcatggtgtgtgccaaagaataaatgcaggtgtcctgttgttactccatctgtttctggtttatgtgttcttacctggatgacagctgtgctcatcctctaatcctgtacaataccttgagagcacaggccttttgtgagatcaaatrcctatgcatgacaggcaaataagcaggctcttcaggaccagggaaacgatggcaacagttctgagtctgatgcagggatggcagagaagcccaggcagagtgcaggggcagtgatgtcattccctaytgtgaggatcagtgacaccctctagaggcatttagggaactttttttgaacagaaccatgtgtcagacactgtcaagaaggccaataacggtattattgttaaaaacaaaacaaaacaatctacactagacgagggaatatgcacatcagcttttctgagaagctgcagatgttcataagattgttcttctatgttcctgaaggatttttcaaggaactttgaaacctaagtggctgcagctccttccttgcttttgtgggcagatgctcatcctggcctggcgaagggtgggacatcaccctggccaccaggtctcctgagagatcayaccctgggatctgcccaggtgttttggcctgtttccattttcatatccaacaaaatgcsttgggaccatggcttcaatcacattacatgctgtgrgtttagagtgttggatgctggttttcagaggtgatcaaamctttttttttttcttgtttaagaaacagatagttaagaaagggagattaagttggagttaataagaactctgagaaagaggagaaagaaaaacagcaaaagtttcttctttatctggaaaataacatgctaaatctccgggtcatcttgagaaatcaaagaaatagctaagaaaaaaacagttgcagggtttggcaaaaggggacrccaaccttagatatgaggtcttctgaaaacttttaaaatttgtttattttttgaatcagtagtgtgtatagttaaaatttttaaatggttataaaagttgtcaaagaaaggatgtctttcagctatcctatttttctcccaaaggcaaccacagttccattttcttaacgtgtctttcaaaagcttgtcaataaatatagaaatctgtgtgtgtacctccttttattttatgcaaatagtagtatactgtgtgcacactgtagtaaacttactttttcttttaaaacatccaacagcagaatggaggaacagattttggcaaatcgcacaaaatctagctgtaccagatgaaatacaactcagcaataacaatattatgttattatgatacacacaataacatgaatgacttttgaaagcattaaactgagtaaatgaagccagacacaaaaggctacctactggatgattcatttatatgacgttctggaaaaggccaactaaggagaaagcagattggtggttttcagcggccagggtttgggggaagggctgatgatgattgacttcaaagagggatgagacaactttctggggcgatgaacatattctaagatcgtggttgtagyggttgtatggttgcatttattaaaacttaacagagtgcacacctaaaattagtgaatgttatgtatgtaaattatatctcartcaaacttattttgttaaaaaaagtttcgtggagattrttccatattggtgcatatagagctttcctgttctttttcagtagttctttttcactattccttgatttatttaacctgtccaggtggtcttctatatgtcagttccagactaacctgatctgatgcttgtagactagttatcytagtttgcttctccagaagaggctcctcttctctcccctagatccatagtatcctggctgaggacccctgagagggcagcatggaggggccctggtgctctctaaggtgaccttggacatatgtcctacagaggacaagcctctcagctatagggtgcccaaggaaaatgggagatttttcttgattcctgcagttggctttgtgcccttggcaggctctcctggtctgtaggtagcatagatggcctgaatgtttggtaaggggtgctggaaactagggcaagaaaagaggggaaggytgggatgcatagaactgatgtgtgggaaactaccttcatcatccagctcaggtgtgaagccgctgctcatgcgatatgctctgctcacacagatggcactaaggaaccgggaagctgggctttggagaccacgctggaagtcagctcactgagtgtgggttgccttgaccatctcctctgggaggccatgttgtgcatagctggagaacaaactggggatgaatcaagaagggaaagggtgtggtgaatgttcagcatgggagctgatatctccgatgagcactgtttggccattgatttatttcttgggtgcaatgaagggctcttaatcttctgcatttggacacttgccacagaggacattgtgattagcaaaggaaggcacaaaaattctaatccaaaggctttgcccgccttaagtccktttttgaaatggagctgatttaaatatgtaagtatggtcacagcattgacacttcagtggttatcgtaagcttatttstacagtatgtgagatgcagtttgtagcaattgctatgggtaaaatttttattttaagaggtgactttctatttacagttattcatttacactgggttcatctattaatatatactgttgatgcccttttaacactggtattctttgaagtcacacatgataatgtgttctgttttattggttttgtctttatatttgagatgtgattataaagatcccttctgcctcaaaccttgaacttagatattcattataagcatgattcccttcaaagtaatcaccttctagtcattcctgttttgaaatttcttccatggtttgtttattcacttttatcatggtccatttttactctaggagttaattcaaattttggaagcagcaagatttctctgcaatcctctctagtagataatagtgtgtttggggaaaagtgaggtataataatacaggaattagtattaargaatgtagtaattaaactccttttgaaaatgattttaaaagaattcccatratattcaggtaatagcgataaaagcagctaacactaatcgagcatttagtatgtgctggttactgtgagtcactacatgtgagatagttactgtttttatcctcatcttactgtttcaaagacaaggcatagargagtgaagggacttgctcacaaccttacagttgacaagtagcagaggtaggatttaaacccgcaagtctggctcctaagacttgggtttaaaccactacattgtaacacccctcataaatacaagctagaactattagtaactagtacttattatatgccagatactcttctacaggctttacatgaagaaagagaggttaagtaacctgactcaggctatgaactagtgagagacttcactgcctcttcataatagagtcctgggaccttctctgtgttaagcatatggcccccagaggtgacagcttttgggggtttatgttctagagcagtgatgtgctgctaatgtttaacaactagctcttggaaagaggggacatgacttttgtagcattttgcaaatttccctggtgtaaatattcttatcatgtctgatttcaagctaccaatgagacatcactgaatgtggagttaggaagagatgcacaatagcacacagttgtttagtatttccaatagctctaaatatctttaagagcatagatgatagtaaagtatggtaaaataattaggaagttatgagtgttgagtatttattacatttatcttaatataatttacttatttttaagtttattcaatttaacttttaataatggctgtgtttaacaaccctggctcataaactttctgaaaatttaacagttggcttttggaaacccactgcagcaagctccagcacacaactgaatatgttgagggtttttttgttgttattgttgtttttaattttagattcacaaggtacaggtgcttgtttgttccatgggtatatcgcatactggtgagtattgggcttctagcatgtttgttaataagttggtcatatcactcaagtcatgcctgatacacagatgtttgattatcagagtctkttttctttcttgtttcctgtggctttttaagttgatgaataataggaaagtaaatttgtggggtcagttaaaccaccagacgacagcttttatgtttgtacattggttcagaggtactctgtattttgactggatttattggatagtgtaattgtttccatttaaaacaatggaaaagatttcatttaaatttattgagatcttatttttcaccctcattccrtgcacatttgggattctgttcgccagcccctctgcactctgaagatgcacagcagcctctctgtactctgaagacgcatgaattgctgactgttgggcttgcttggaggggactgggggttattacctcccacaggactgtttaagctctggaagttttcctacctcctgcaactgaatttagtcttaattagtacagagtgaactagctgtgaacaatctggttttcttgctttgtgccttgatcatgtgagacctaagggctggtcctgcccttttcttatccattgctttaatcagaaataacatatcaaggtggcccaaattgtgtcactattctttcctttgtcttctccacccattcccacggcatccattcctaaggtcatttggagaattctctgttccaataagtgggatccacatggctcaaggagcaacaggccttggaatcactctttgagtagtagctggtccctcagtctaccccaaagagctgcctcgccagacctccccacctcccggacatacagactccagatgtggaaaaagcccttgccatctctatcctccaacacagagctttggtgtccgagacacatccaagtgacaggcccaagagggcctctgaatgaagacggatgagccgtgtggacasagccacactatgttytcgtgaaggcataagaccatgggccaactttctgggcatccagggctggctgcagaggctggagtgagtggctttcaaggcaagactgataatgaaagtcgtgtttgggtgggaatcacaagcaggggaagtgggggagccagcttcccttcgtgctgtgtgtcacaataagataggacacagatgcaaaagcagatcgctacagctggatctgggtaaaggtggcagtgacgcgtcggtgcagagaattcctgttttgaggaaagattcggagccagctaaggttttctgagggcccgtcatgtctcagactgtcacacttattcctctgtcatgtatgcttaagtcygttttagatgaccccttgtaaagaaaggaagcctggcccctgaagcctcattgcgtgggataaggggactaacatattctgtggttgtaccagcaaattattatttatttcttattttataaaagtatagattttattcatgcctatattgttagagaaaatcattatttttagtcaacgtattagtattaatatcatggcctcttttcttctcattttggaaggggaatatttttagactctttaatgagagagtcattttctcagtaaatatttgattggcctgaagttaagtgggtaggcgtaaaaaattatggaagtattggacttgagcaaacttttgacaaatagcgctctctttctctcttgggcgtatgcgtgtgtgcatgcatgtactccagctctctgtgtatgttacacacacacacgtttttcgcataaaacatttttattttgggccaggtgtggtggctcacgcctgtaatcccagcactttgggatgctgaggcaggcagaccatctgaggtcgggagttcaagaccagcctggccaacatggtgaaacccygtttctactaaaattacaaaaattagctgggcatggtggtgggtgcctgtaatcccagctactctggaggctgagacaggagaattgtttgaatctggtaggcggaggttgcagtgagccaagattgtgccactgcactccagcctaggagaccgagcaagactccatctaaaaaaaaaaaaaaaaaatctttattttgaaataatagcagtcttacaaaaaagtcattaggatagcacaaagaaataccgtaaattcttcacccagattccctaaatgtcatttgctttgtaattttctatctattcgtacttcttacctgtttgagagtaagtcggagacgcgatgcccccttatccctaacatcagggatatttcctgagaacaaggacattcttttaygtaaccatagcacaattattgaaataaggaaattaagtgatacattactgttagcttatctgcagaactcactcaaatatcaccagttatcttcatgtccttggtagcaaaagaaaatcccgcactattgcatttggctgtcacatctctttagtctggaaaagtcactcagccttgctccttcatgtccttgacatttttgaagagtacaggtcagtttgtctgtttcatcatgattagattcaggatgtatattttctgcaggaataccacagaatacttgtgtcctatatatttaaaaacatatacatccaacatcactgaaggtatgtatttttaactcctcctttaaagtggttttccaaagttagttgccatccccaaaagggagcttttagacattgagagaggtgattatgaaagtacgatagcttgctcaccacctctctcctctgctcctgggagcacaggggagtttcaactctggggaaggygatcatttgggtcattagtagcgctttgagtaccatggtgtctgcagggagttcccagttcttactgctgtctgagaataaaacataatatctttggtcttcacagaggtatcagacaggaattccactcagcttgcaggaattgagaccccaggacaggggcttaagcacatcaagataatttctctctcttctagaggaagagaagttgctgatgttggttcagtgactcgaggatgttctctgacctttcacttattcaggaaatgtgcattgcatacctattatgccgtaggctggggggccctcagctctgctgtgaagagacaaggatccttgtccccctgggagtttatatcccagtagggggagacagacaatagatataataagaagaaaattaaggtgcattagaaggcgatgaggctatggaaaaaaagaaagaaaatagagcccagtgaagcgggtttgggagtgcaggcatggggttatgggggtcagggtgacctcactgacgaggtgtgatttgagcaaagcatggaaggaggctggggagttagcacagcgggttcctggaggagggctcagaccagtgtctgagtgtctggtgtgtctgaggaggagcagggagaccagtgtgggcaaagaggtcagagtggcagtgatggttgtgagcgggtcatcttgggcttcctaggccttgggaaggatttgcctttactcagagggggatgggagtgtgtgagggatctgggcagggtggtgacctggcctgccttccatttttacaggcccctgctggcggctatgttgggaaggcctgtaggaggcggtagagcagcaggaacggggttaggagactgagcgttacccagggaagagggtggctccactggggccatagtggtaacattgtgagaagtggtcaaattctgcgtgcattttgaagggggatcctacagcatttcctgagggtttgattgtcagttgtgagggaataagatatcaagggtcactccargcttttcagcctgagtacctaaaaggatggagttgtcactggtggtgttttcaacggaaggtgcaggtgagcaggttgaaagggggaagatctggagtttgtttttagacacactggtagatgtttaagtgtgtatgcgtatgtatgagtcttcagtttgagtagtagtctgagtaagaagtatcaatttgggagtcgccagcagacagatggtatttaatgccaggagatttgatgagatcacccagggtgtgaggggagatagagaagagagggggaccaagggctgagctgtggacactccaacactaagagcatcttttcctcctacccctaaaatggctctggggctccagccattgtatgtgtttttcatgcaggaagaagtgggacatgcaaaggggctctttataatctggtctgaggcccctgtaaagagcctccagtgacttctgcttataacgcattgaccatccatattttaaaagaggttggaagatgtctaagtaccagctagacatcttataaatcctatcactatagagttttgctctscagcagaactttctgtgatgaaggaaatgttccgtatcagcactgtccaatattggtggccagtgaccacatatgactgtgagcacttaaaatgtggctagtgccaataaggcattgactttttacttttctatacttttaattaatataaattcaaactgaaataacacatgtggctagtggctaccatgttggacagtgcagatattgaagtttgatttttaagaaggagagggacagacactggacagacaactcacagctcctgccacagtacagcatggagcctcccaaggcactagtcacacagatcaagccacacagccaaatggaawtacaaataatagattgaggtcacattgactgtttcacgttgtacttagacatgctgattaaaacctgagttgcaagtgtrccatggaacataatctctccctctagtgttttggaacaatcacacacaaatgtttatatccacatacaggccccatatacaatgggggaaacagaacagaagaaggttggatggttcaccaagttgagtgggtccttcaaaggatgtcaccatcttggatgtgatgttttctgttttcagtggcatagaactagataaaaggtggcagtgcagaggatggaagtggtattgctcagtgggaaagggaaggcattttaggtttgrgacatattacaatattgccttttagcgtagaaaagccctccttcctgatgctcttgctagtgctgggtggaaagattccctttcaactcaacatgtgtgaagcacatgaactgaagcactcttcctgcttagcatggcaggggctgggccaggccagggtggaccaggtcttgctctgatcaaccacatggtctcaggcaagttgcttcacctttactgctgagcttcagtgtcctcagctgaaatggggagcagaatactgacttcttagtaggggtctggtaamcactgggccccttttyccttctgctctaccctgcaaatcttttcctctttctaactgcctctgcatttggaaggggtcaagactcgtttcatagttttttgggggattaaaaaatgattagaagcagatggtgagaagaaaatagaaagtatggagcaaataagaaatgtgggaagagaagagggcaaatggtaaggcagctctcggagctggcacgttctttctctctggaccagagcaagccagagcctctcagtcatcttcacgggctggttgacaaggactcctcacgttagcgtgcacacgaagaacctgggaccttgttcaatgcagatcctgatacagcagatctgaggtgaatttctagcaagctccctggtgacgctggtgctgctggtccatagaccacaaagcaaggagctcgaagacatagataccaaaagttacaggggaaaacggacaaagccaccagctggcagttgatgcaggtatcagaagcaagtgggcctcggaggggccagatgcctctctcctcacactgaccgtgagagcgagtgctcctcatcaacaacgtggggccaggcttgagtcagcagcactgactttatgtgayctagtgcagctcgccagcccacgctgatgtgtgttaatggagggggtgcmccttataggagggtggtgtgggctataatttcttctgcattctctgcctattgcttgaaggacagtgttgtcagcagtcaactgactgagcttgacttttcagcagtttttttaaacttcactgcagtgtttttggacacagctatgtcagaaatctatttccccttctcagagaccaggaagctcttgaggtacaagctcttattaagcagaaaattttaaagtggttttccttctccttttcttgggtctgctttcttggggcaaacagaatacgagaagccagcttagaaattgcatgggtccttcctgcattttgtgagaaaatggtggcctcctatatttcttccctgacaggttactgtgggccaccagcctccttggtgacttctgttttgcagatggggaatttgttgattgtagtgagtacgctgtgtgcggcagaaaggattctgtcacctacagagagctagggaagcgcccaggctgaggaaacccaccccttcgaagcagccatccataggtagcctgggggtcttttcacaagacagccctagccccagttcatgggagttggaacaatggtgggtccaatggtggatgaatagtttattcacatgcatcccaggagatttgtgtgaagagggtgacagagagttgcttcttttaaaaaaaatgtattaagggctatgtaaataaaaagaagaaattaagttgtaacagtaacaataatagctatcttttattgagcatttactatatgctacatgttttacatgtacatgaagtccttataaagaatacaattacatatgttaatatgtgattatatacagaaaattgtatcagaattatatctacatatataaaaataaaataaaatctcattttaccattgagggatctgagatttagagcatttaatttatttaagatctcacagctggtaagcagccaagtcttgggtttgaatcccatccagcaaccaactagttctatgactttgaatgcaaaagatgatggcttttctcattattattacctagttagtctgagaaagagaaaactccattctggatggcccatttctgggtggattggtgctaggtttctcctggtcttggacgaggttgcacttttcagccgctcctgtgcacgtgtgtccgtgctctgaggtgggaggaaagctcaatgtgggtctgtgagtccagggcaggcaggagtcctggggactggaggttctctgcacttctgtttgatcttccctgcctgtctgtggcctctgcagtttaaacaatgactgtcacttaaacctcttctgaagagcttgaagtctggtccatgccttcagcccaccagcrtgtgttgagtacctgttgggtacacagctctgtgtctggtggaggggaaacaaagattaaaaagacygggccctgtcctccaacagctcaggttatttcatgcctgcattcggggcactgtcttacttggcctagtcccacacttgtccctcccaccccttgcttctctattttcaattcacttctgtttctacacacatcagtgatgyagtgtcctatgtacaggtgtgcctgggacagtcctggtttatgcctgttgtcccagcataatcattaatagttctctatttcactctcaagtgttccratttggatggcaccctatttattgagtgctcattgtgtgccagacactgtgctgggcccggggcagatggagactygtaagccataaccgctgcctcccaggagctagtctgctggggcatccgttctgaataccatgacttggcaagtgaagcattcccatgccttccagactcctggctctgcctgtgtgaaacgtactccatttccagagccagctrccgagctttttcccctgggctgactttccaccaccctgacctgcgattcctctctgctaaccctcctctcaccgttctccccagggtgggctgtgggccttctggtgctgagctccctcacatctgagctgtcttagcaccttctttccrcctgtatttgtgttacttggatatttgtgttttatcttctgtaccagagcataggttattttaaagcagggagcttatggcattcaacactgtcaccctgggaataggacccccaaaacactttatttctcaaataaatgatggagtaggttccagcgttgtttcttccttgctgtccatttctaaggatgagtaaagagttaacgtattgaacttgaaaggagagatttttttccctcttgtaataaatcaaacttttctgaatctggaaaagtgatggatgaaactatgtgagmacacacacacacacacatatacaccccataaccattttgaggtcatttaataagggattgctttctggataatctcgctccttgggtataaatctaatgtgaaagggcaggggtcagatatttaccccaaagggttggtgtgaggataaaatgaggcattgcttttaaagtgctaagctcagcccactgaaaaatacgcaaatgcatcagaagagtcctctgtaaatccactgagctggaatttccaagcaggtgtccttgctgcctcttgttagccttttgtgagttaattctttgtttaataacaaagagctgccagatggtaattttggaggctcagatacactctgttgcacgtgcctgtccagcttacttaaaatatgtcagaaagaatgagggaatgactcaaacaatttcaggaaatggttcaaggctgtgtaacctttaaggaaaaccacacggagccattaccttgtgttgaaaggcagctccctggctccctgggaggcctggtggcaagcagtgagacacttgatttaggtgaaggggggccccaaggcagtggtgcctcccttccttctgcccagaattgaggtgttgtccctacagtggaaactcaagagcagcactgtctgatagaaatataatgtggtcacatctgtaattgtaaatttccttttttttaaaattatgctttaacttctagggtacatgtgcacaacgtgcaggtttgttacataggtatacatgtgccatgttggcttgctgcagccatcaactcatcatttacattaggtatttctcctaatgctatccctcccccagcccgccaccccccgacaggccccggtgtgtgatgttccctgccctgtgtccaagtgatgtcattgttcaagtcccacctatgagtgagaacatgtagtgtttggttttctgtccttctgatggtttgctgagaatgatggtttycagcttcatccgtgtccctgcaaaggacatgaactcatccttttttatggctgcatagtattccatggtgtatatgtcccgcattttcttaatccagtctatcattgatggacatttggattggttccaagtctttgctattgtgaagagtgctccaataaacatatgtgtgcatgtgtctttatagtagcatgatttataatcctttgggtatatacccagtaatggrattgctggatcaaatggtgattctagttctaggtccttgaggaattgccacactgtcttccacaatggttgaacgaatttacactcccgccaacagtgtaaaagtgttcctatttctccacatcctctccagcatctgttgtttcctgactttttaatgatcaccattctaactggcatgagatggtatctcattgtggttttgatttgcatttctctgatgaccggtgatgatgagcatttttttttctagtagccacattgaaaaagttaaacaggtaaaactaatttcaataacatatatcagtttgctagagctgccataatgaagaccacagacttgtggtttatatgaacagaaatgtatttgcccacagttctggaggttggaagtccaggatcaggtgtccacaggtttggtttctcctgaggcctctcttcttggcttgtagatgactgccttttccctgtgtcccygcatggtctttcctctgtactcatatctctggggtttctgtgtgtccacatttcctcctattctaaggactccggtcagattggattagggcacaccctgagggcctcgttttaatttaatcaacccctttaaaggcccagtctccaaatacagccccattctgaggtactgggagttaggactttaacacaggaattttgggggaacacagttcagcgcataaaaatgtatattatttagtccaatatagccaaaatgttattatttcaacataaaatcaataaaatgttaatgaaatatttgccttctttcctgtactagggctttgaagtctggtgtgaatattagccccattttatgatctcattaggcacacgtgggtagtggtgaccgtatcagacagtgcaggtctagtgtcgaacctcctaatctcttgggagaccttgggattgtcgtaaggaggcctgagtgaattcataaaacatatgcagttcctgaatcaactaataagtaaaagtataccttttatcacctgaggttctggtaaatattttggtattataaaggttgctttcacacttacaaaagttaagaagcatggttctgactttcctaaactggggtttctagagcccaagctccattagcatggtgatgacggcctgcaaaatctttccagcatttcagaaagcctggtgggatcacaggggttgccattcagctactgacaaggtcagcatcattgctttcagctggcgttttagtacagtttttctggtgaccttgtgctgatcaaactttccgcgtggctttttatgacactgtaacaattactggggtcatgcctggagaggtggcccacagttcatgcacaggctcgagtacaagccttccggggactcatctctcagccctgttattattctcagggatttggagggtgcagaggtagatgaagtaagcaagcactattgtgcttcctgtgttgaagtcagggaataagaatttcctctgtgccacaaataatgctccccacctgtatagaatgcctgggaaatgcaacactggccatccttcagctcytctgcttacagctgttgtgctggtgggtctcctcctattctcagagcagagagccacgaatggggcactcggggccgtgacaggcatcccttagctctggccttctggttgtgggcagactctgctgtgtccggcagcccatccagcgttggatggcatcagcaacctgaaagccctttcttaggctgaaccagagtctacctccatgtaatcacacactcccctcctatttctgccccggagcacctacagatatctgtctgtctgtccccatccccactgcctacttcctccagactcagcatcctgagttcctttgggttactagttcattttggaacttattccactattgaattatccgtattctttggttttatacctttattcctctttagttgaccttttagatacttttctaaccawgccccctccccgctgccccgaaagatcagggaaaataagaagaaattcaaacccttgttktgctcctcatcagcgacagtggtagggaagatgcccacggcacggaggttcagtggttgttttcattctttcctgttagccaktttcctcaaattggtcagtataatcctacctcttggagcgatagctggctggattcttctgccattttggcagttatatattggtctggatttaaaagtgatgtttattccatagctctcctgaatctgacatttgttcctctttcatcctatacttccctgggcatgatacccttctttccatcagctgtgttggagaaatgtggcatgtggcagatgtatccttgcttgtttaattaatgagccaaacagtccagaaacttaggttacaaccaaggtagtctggcaagaaatatacatgaattcaaagaggtttgggataattttattaatgataaaaccataaagaactcagaaaatattttaagatgcttggcatcaggaactatttcatttgtctccatatccccagcaccacgcagagtaattgacattgactaattgcccaataaatgttcactgaatgttaggagaagctggagtatttccaaaatgaacatatgctcaagatattctactagaagtttacaatgttatcttttacatttagattagtgatccattttgagttaatttttgtgtgttgtccaggatagtttcaaacagttgtgcaaaacaattctgtttgttkgttatcatgggtagactaatacctgtcagatcatataacccgacagtcagctggaaacacttggtcacatgagattgcctatctacattttaaatttggcttcagagggagcagccagcaactcccttcaaccccctaaattttggattgtcctaatgaaatcttggactgaagcagtacatttttaaccaggctttctcaggagatttggttcggctggcactcagcccacactttgcttaactctgagcaaaggtgtccgtgggtggataatcccacctccccattctggatgtgccagcacttttcctactcatccccagttatggaatgtctaattctttctcattttctcctgtcactaccatgctgcagtgagcatcttgggtcacctaactattaattctggaggacagattccagccgtggctttgctgggtcaatgttacagccatttatgtcccctcagatgttgggttggtcctggatgctgccctgtaactccatcacacccatctgaagtcctgcctggtaggcagcagacactgggtgtggcttggtttctcatacctttttatttcagtccctggtgtttttgtcatcttgtgtggcagtggcagtgctccagctgatcatttttatgggacagtccttccttgatgagacccagatccctgtcacttgacaacataaagaatattattcttcataccagcatttcccaaagcattttttcaaaggatagtaacgacttttatgtcaaaaaacaaaacaaaattttgaattcaaattaattttggaacrtaattgaatttaacgcaggctttttattgcaggacttcatggagctttagaagcccaggcacgcaaggaggatgcactgtttggcatttcctaaatgtacttgaccacggaacaccatttttctcctgaggtttaggaaatggtgctatgatatagattagttttctatgaataacttggctttatgccttcatataccttttctctctactcatgtagaaactcttcttcagcttcatgttttaataatggaagaacttagtgatgtttcatatstagagatttttctctaggtccttctcatcgataagacctgtttcaagatatggcaagccctagttctgatctctggggtcctcaccatttatagacttccattagtcctgttgtgacttaattgttttgttatatttttggtggcctcctacactatggaagactttctgaaagcccatatctcatgctaaatttagctggatttttaacagccttgattgattgctggtcttaatggaagaaaatgtgatcctttctcttcctcccttgtcattaaattattactaatctatgaccagaggaagcagccactgcatacgtgggtgtatttttaaaaattgtgacacatcatcaagatggatatacttgcccctttaattcaacaggcacctgttgaatgcctgtgcatgcaaacatgatgctgggctgagccctggggcttmccctgaagagctttggagcccacagcagaactcccagccaggctcatccaccactacagccacaaccatccctacctggagaaaggggctaaaagaagcccatgggattaacagacattctgaaacaccaacccttaggaaaggagtagaaatgggagttgggattaaaagcagaggtgaggttaaagggtttgaacaaaatgggcctgatcttgggcttctgaagtcctgtatagtgtaagtgctgacctgagggcctgtggctctcctgtagtgagggaggatccaactggagtatgacttccacctctgcatggccagcctggtgaygtgaagcacatttcttatgtcaggttcccagtttcctcttctgtaaaatggaggcagcatgggattgtaatgaggattaatggagctcatttacctgaacsscccagagggtgcttagcaaatactttatgcttcttgtgggtccattactttcccttgcctgtttttttagggaccctggagtgttaccttggcttctgattaaaagctaggttggcagatgcaagcacacatgcctcctatagtgttgtcctagactggggtggtgttagtggtcaggcaaataattgatcactctgtgttctcaagacaagcaatgggtaagaagacaaggccacggaggtcaaagatacagaaagataattgccatatatgctatgcagccagtkcccctacctcatgtgattgtagagtggttcttacactagggtggcatagaatcacctgaagggcttgtttaaacagatcatgggtggtgggtacagcatttcaggtgcggaagatgaaaggttctggaggtggatggtggtgatggttgcagaataatgaaaatgtacttaatgccatagaactggacacttgaaaatggtgaaagtgatacatcttatattgctctccctgccccatcacaaatagattgctaggctcactccttatagattctgattctgtacctctgaggtggaccttaagagtctgcatttgtaacattcccacgtgatgctgctggtctagggaccccagtgtggaacccttgctgactgggttgggagtgacgttgggaactgtttcgccagaaatactggggacccttgagtggtaatggaattggttgtatattttagtatgatagttcttatagatgataaagacctcagaaaaatctcactatgtccatgcccaagagttccaccatgagcacatgccttgagggcagtgaccctggctcctattgtctctgtctctctatatctataacttttaatcttgaaatagtttaagattcataagaagttataactcataagaagttttaactcataaaaagtcaaaatagtacaatagtccccccttatccattgggaatacattctaagacccctagtagatgcctgaaactgtgggtagtcctgaaccctttatctrctgttttttcaatctgataactgagacagctagtaagggattaatgggtagtagtgtaatagcatggatgtgccggacaaaggtgtgattcccatcctgggcagtatggcatgagatttcatcacactactcagaatagcatgcagtttaaaacttgtgaggatgaggggaactactctatggaaagattcaggtaccctttacccggcttttcccaatgataacatcttacatatacatagtacattatcaaaagtaggaaactgttattggtttaatactatacattcttttaaaagagtgctcaactcaagattaggaatctatttttcaactaccattagccccactttggcaaggccaggtgggataagtgctggggctcctatggtgggtgtgctgcagtcttcagcagagcttggctacagaggagaaagatctaaactggaccaatttcatatggtcawtkcctctggcttgtggctgatcatcttgttctttggaattgactgtctcatgaaatagtgagtttcttgtcaccagagagatttaagcaagagccatggaatccctgtccccagcactgagaaggaacatgaaccatgtattccctgaatgtcttattccttaaaaatcctgtgattctatcaattgttttgttagagtttgtggctgacattgattacactatgagtcatgtgacattccatgttgatgtagttgccaaaatgctcgccttcctgggttctgctttcattagtttgagagaggagctgagccacagaaaaggggctggagtctgctagattaatgaagatttgggatgtgtagtctgttttcacactgctgataaagacatacccgagattgggtaaattataaagaacaagaggtttaatgaacgcacagttccacatgactggggaagccttgcaatcatagcagaaagcgaaaggcacgtcttacatggatggtggcaggcaaagagagagaacttgtgcaggggaactcctctttataaaaccatcagatctcatgagacttactcactatcatgagaactgcatgggaaagacccatccccatgattcaactacctcccactgggtccctcccatgacagtgagaattgtggtagctacaattcaagatgagatttgggtggggacacagccaagccatatcattccgccccggccccttccaaatatcatctcatcacattccaaaaccaatcatgccttcccaacagtcccccaaagtcttaactcatttcagcattaactcaaaagtccacagtccaaagtctcatatgagacaaggcaagtcccttccacctatgagcttttaaaattaaaagcaagttagttacttcctagatacaatgggggtataggcataaggtaaatacactcattccaaatgggaaaaattggtcaaaactaaaggctaaatgcccccatgcaagtccaaaacccagcggggaagtcaaatcttaaagctccaaaatgatctccttttacttcatgtctcacatctgggtcatgctgatgcaaaagataggctcccatggacttgggcagctctgcgtctgtggctttgcagggtatagcaccccacctggctgctttcactggctggcattgagtatctgtggcttttccaggttcatggcacaagcagttggtggatctaccattctagggtctggaggatgggggccgtcttctcacagctccactaggcagtgccccagcaggagttctgtgtggaggctctgaccccacatttcccttccacactgtcctagcagaggttctttatgagggcccccgtgagggccccactcctgcagcagatttctgcctgggcatccaggcatttccatgcatcctctgaaatctaggcagaggttcccaaaccttaattcttgactttgtgcaagctgccaaggcttggggcttgtgccctctgaagcaacagctcaagctgtaccttggccccttttagccatggctggagtggctgggacacagggcaccaagtccctaggctgcacagagcagggggaccccaggcctggcccatgaaaccattttttcctcctaggcctccaggcctgtgataggaggggctgccatgaagacttctgacatcccctggagacattttccccattgtcatggcgattaacatttggctcctcagtacttatgcaaatttttgcagccagcttgaatttctcctcagaaaatggatttttcttttctatcgcattgtcaggccacaaattttccaaactttaatattctgttttctttttaaaactgaatgaatttaacagcacccaagtcacatcttgaatgctttgctgcttagaaatttcttccaccagataccctaagtcatctccctcaagttcaaagttccacaaacctctagagcaggggcaaaatgccaccagtctctttgctaaaacagcaagaatcacctttactccagttcccaacaaattcctcatctccctctgagaccacctcagcctagatttcgttgtccctattattatcagcattttggtcaaagccattcaacaagtctctaggaagttccaaactttctcacatttcctgtcttcttctgaaccctccaaactgttccaacctctgcctgttacccaatttcaaagtcgcttccacattttcagatatcttcacagcaatagccccctcctggtaccaatttactgtattagtccgttttcacactgctgataaagacaacaataccccactcctggtaccaatttactgtattagtccatttttacactgctgatagacactgagactgggtaaattacacagaaaaagaggtttaatggactcacagttccatgtggctggggaggcctyacaatcatggtagaaagsaaagacatgtcttacatgggtggcagcaggcaagagagagracttgtgctggggaactcctcattataaaaccattagatcacatgagacttattcactttcatgaagacagcacaggaaatacctgtccccatgattcagttacctcccactgggtccttcccatgatagtgagaattgtggaagctacaattcaagatgagatttggatggggacacagccaaaccatatcatgggggtagagttgagggaaggagagaacattccagggataggaaatagcacatgcaaaggtcctgtggcatggcctttatgtgtaaaggagatattgataaaccttggtatgaaagactgtaggtctctgggtgcaaagtaatggctgagcatgaagctgaattagacttggccactagcttactttgctgttgacagaatgttggtacagattgagcatccttaatctgaaaatctgaaatctgaaatgtcccaaaatctgaaactttttgagtgctgacatgacaccacaagtggaaattctacaccttacctcatgtgatgagtcacagttaaaacttttatttcatgccccaaattatttcaaatattgtataaagttacctttataggtcatgtgtagaaggtgtatataaacataaatgaatatgaagtttagccyttagtcccatcctcaaagtatctctttattatatggagatatttcaaaatctgaaaaaatccaaaatctgaaagacttctggtcccttatatttcaattaagggatatgcaacgtgtacttctgcagctgccttgagaatgcatatcattgaataatgttagtgggaggttttaaactatctgaagatcacacaactgtgagagcccagctcccctgaaatgygtagggttggtcagtgattttgctatgcgccaaagcagctgccttgatccctcagagccccggcatttctgcccggggtttggccacccctggccttggctgacttctcatggatgcagcaaaaacccagtaggatgcacctctcaagtggttggcagcttttactggacagctttagagtcctgtgggttattctggttgttgctattcttaaatattgagtgtccaaaagattcgtgaactgcatctcagctgggtgggaccctttgggacaggagtaggggaataatgccgtcgttaaytgcaaagaggagttttgggaccaggttgtcttataggtttattttgaacaactgataggcttggtattgctggaagtggatagatttgggttgcctgtgtctagcaggtggcttccttttccagtatgttgcccactggtctcatctatcagactcacttgagagtatttcattattcatctaataaaggagtatgtgagattcccagaggaggaggatctacttctgtacttgacctgggtgaggaccactgggaacatttgcacctttcaccattgcaaactttgacatgtgagagtttccagaaatacagagattcttattttaatcctttttctttttaactgcagaagggaaataataatgggatagaataactgcagggagtagagagatgagaaaacattagaaaaaatagtacagaagtagagctggatgagaatccaagttatgagaacctattgatgagaggcatgcagaaataaaaagcccaaattcagtgatctaaatcagggctcagatgaggctgtttgtattgcacggtaggaatatatccagaaacagtgggccttttataaattaagcctgccattctccaattgcttaagacactgaggcccatcaggccagaaacatatgacccactttttctgagaaggaactttccctttaggagtggtaatttagaagaaaagaacaagcccaatgaatagtcccttatgggaggcatctcagcagaggccctttttgggggcaggagggattgcatagcaatactgcctacccagagttgttgttcccaggctagggtccaamtcagggcagggagatctactggaggcagcgtatcacacactagttgtccaagagatggagagagagtgcaaaatctgagctgtgcttatgggaagctcggagtctcacaaaactacacccatgctgcccatggtttatgtttaatgaatgaaatgatgattaagataggacaattggacaaaaaggctgggccttcttaggtgggtattgagtgggaagtgattcaagaggscagacattctgtctggayattagctggaagtggggctggacaagatgaactagagccctcttgtggtcccatcattcaggcctgtagctttcatttgagaccagtggttcttaaacttttgcagggatcagaatcacctggaggacttgctaaagcacaaattgctgggccccaccccagcgtttctgattcagtgggtctggggttgggactaggagtgcatttcaaagcactttctggagatattgatgctgctggtcctgggaccacactctgagatacagtaatctagaccatgaaggaggtctggatcctggggagggaatccgctttctgctttcttaggcactaggaaggcaaggagatacttggggctggaaggtggcaggggagcatggaagggaggagtccttgtccatcgtgtctcaccatctgaggagctgtcatcctttattcatcctgcccttctgcttgccctcagtctcagaaattccaaaagacagcttatgaccctgcatttttggttaaagaaaggagggaactgaactgtctgctctatgaattctgggctagtggggatcatggggattttgtaaattattttggtagcccgttgagttttgtctcaggatttcagcggaatccaaaccatgtgacatggaccattatcattcagctgccacctcctggatcctgccctgtaaacatgcccaggggtctctgaggatggaygcgtgtcattcacacaccaagtgtgttagagacaacagaaaaccttgtttttttcctgtgttctggtgaaagtcttttctgtctttccctttgtttcttcgagggagcttgagtggcaggattattattaagagtactttttaagttcccaacaattagataggaaatgaactgaatgggrgttcacattttatcttcaggaaaatgaccgcaagaaggccttactgtggggtggttaagagcatggcctggctttggaatgcctggattgggaatccttgttttgtcacatcatcgctgtgtgatcctaagccagtgatgtgacctccctgcacttcaatttcctcacctctaaagttgggataatactacaacttatttagtaggattgctgtaaggaccaaataagataatatagctcatgcagttagaattggacctgtcacttacagatagaaggcaatacattttagttcttactgtaagactgagacatccaaagacgtctcatactgtaatgtgtgatatttatgtatatgctttttaaggactacaatccttagtttcctacctactcaaggttatgttttgtagatgctaacagtgtacattctagagaaaatcagctggagggaggaaaatggyacagttctaaaattctttaagcctcgtttaattttttacctgttactgctttcatcatcacctctcactctcattttctaataagcctgaaaagcatgatggagtcataaatcatgtctgtaaaatgaagatgtgtagrctttggtaagatctcacatgtgatgttaataacaataccttacatatctggcctcacacttcacttaaactgtcccatttaatccctgaagtggtctcattagcttctgttagtcccattttacagtttgtacagtggagacttcagagaagaacctggcccaggctccacaggcagttaatgacagagctgggatttttttttgtggaggaataggggagacttttctggtaaagaccagaaaacctgctagacaaattctaaaagagccataacactcagagckgggattttaacttcatcttctgcttcagggaccacattgttcccagtgtgtttaaacmcctggctggtttttcacttggggttctcattcagattcgtgattctgtttactgagagatgatgtcccagttactctagctctgtaacaaatgactccaaaacttggggctgtgaaataatcattttattttgctcatggattctgtgggttattcagactcagtgttccatgatatttggggcctcagcaggggtgattcaaccacaggagctagagtcccctggggtgtctttgcccacgtgtcccacaggtgcatggttaggacagggacctcagatgggctgtcatccagaacacctacgtgtggcctctcaatgtggtctttctgcctgggctgacttgggtttcctcagagcatggcaacctgattcctagtgagatttccgagagagtgcggttgtctggcacttctgtgatctggcaatagcttcaaggaaggaaatatatttttacattgaaagaagagaatatgagccatgtgtgccaggtacggggagccacctgtgaagatcctgagtagaggcttaggtcactgtggacacagtggcagcagtggacaaggacaagggatgccgggtcatgcattcaccccacaaatattccatctatctctgaactaggcagaatgagcagggcaccaatctaatggctcttctggataatcacttcacatgggaatcctaggactccatattatattcttatcctgttgaaaatttgaccttttaaagatttatttatatttagctcaggccttaaaarttccatgtactatctaaaaagggaaaagttcatcccagtcaatgtcctgtcttgcttatgtttaagttggataggaagaaaaaaatccacaccaggagaagattggttgtaaaagtttattttacatttatgtgaagtttatttttggttctgatattcttcatagggtagatatttcttttaagactgttaatagtgtatttcctttttatttgccactccccaccaaaataaaccctcttttatttttgaatcagcttcatatcttcagaacgtccaactttaaataatggttggagaagctccaggttaagtagagagtaaaatcctattgctttctgacctttgggttaggatcaagtgtggtgtaataaaatatcagtcccaagagtcacctttgctgatttttttcctattattctttcctgttattccatattcatgcaggtcttgcagccaaggattgttacattaagatccaatctgaaattaaaacttatggttttaaccaataagctataaagctgttgaactcccactgggatgtagttaccttttcctaaacttcctgcattgtctccttttagccccacagttgatttcttattgagcctttggaaagttccttgccgtttcacagccatttcccgtcagagtggggaatattgactgtgcaaaccacttaaggtcacaggcrccacagctgtgtttcttctttgcagaaggggggtttctttgggtggggctgtgctcagcccttccgggtggtgaaggtctgaggtcacactgggagagcaggtccatatcgggattggggctccagcaggatcagaatgacttcacccagacttctggacctggaactcattctcagaaccttccagaagaccctgccctggaattgctttcaagggtctttttcatctgtgtacagagtatatttccttggaggcagctttgctgaaggccccttgagtcaagggtaatagggtgggagcagctatacacagttgcatttcagtgtttgatgataaaatggtgtccgttggtgagcatcttggtggtgaggaagtttatacgaccacagatgcttctcaccccaaggtacccgtgccctgtgctgctggtgccactcatcctagggcattcctgcttggcagtagcagattctagattgtcctgtttgctggtttgggggctgcaggggtctgcagagtgccgcaaggaggaggagtcccagatcactggttgaccttcagcgggcatttaacagcatattccatcaggcctcacctactagtgttttgttgaggctgctrtgtaactttgactttctctgctgtctcctatttaagagtaaataaaggtagtgacagtcacaaaaatagcatcaatgatgacaactagcgtttactgagtgctgactatacccaggcaccattctaacctctttacccaagttgtctctgctagtcctcaccacagccctgggaagtgtgtgctgtcatatacccatgaagaaactgaggccwkgaaaggaaagcagctctgcccaaggtgttataagcagagagcaccragacaggacccaagcccaatttgtgttgactggggaatcagtactcagttctcttagtctttggctgttttgttgagtgcccaggtcatcctggtagaagggagacagtgacccacgtgaaaaaggatggctacagatgcatggctgcatggctgtgcrtcatccaccctggagtatctgcttgccaaaaatagggctacctgcaaaatgctttgagcactgtggaaaccagccgttacaactccaaacgtttatttttctgataataggtcaaggttttcataattgagttttaggggggctaattttagactttctgaaaatcagtctcaagaaacaaaacccagagtcaagtaaaaggatgcttttggaactgatgattctcagaagaagccatgaagggctcggccataaccccgggaaagctcactggccagcagcctggagccagtggagcttcaggtggctttaattcttccctggatgctggtggtctccagagacacaggggtaaacaggtcagcgtccttgtcctcaagggcgtcatcctccagggaggacatagctggtaatgacaaaatgtgggccagcgccttcttgcagctgggcacacagggctaggggaactgagaggagaaaaggatgaatttggccttggcttggagcagccttttaacagaaacacgcgtaactttcctgcagatgcacttcctgtgaatgaagagtcttgatatatatttttctttaacaagagaaagccaggcttttgattaataatttatatgtcaatgttgggatcttcattttgttatgagagatttcagttacaacagtgtgaggtgggtggtcaggaaacattccccctgggctcactttttgcttagaaaagtcctgatggagaggttgaggtgggaagagagtgagggggaagactccatggagcatgammrgcatgctgtgcctgccacagccaagcatggaggtcccaaccataatgtgtttttgagacaggatctggctctatcgcccaggctggaatgcagtggtgcaatcttggctcactgcaacctccgcctcccaggctcaagccatcctccctcagcctcccgagtacctgggactacaggcgcaccaccaccatgcctgcctaattttttgcattttttgcagaggcaggggtttcgccatgttgctcaggctggtgtcgaactcaagtgatccacctacctcggcctcccaaagtgctgggattacaggcatgagccaccacactccacctccaaccacaattcttgttttaaaaaatgaaaatagagtgaaacagaaatggtagaatcaagtcaccttgctcattcacagtcatgtgtggctaggacaccatgtggtccagtctgacacaggctgatcctttcccctcaggacccatccttggggtcgtccagtccttgggctctgttcctctgatgtggcacaggtggtcagtggggcagggaagacagaaagatgagggccacatccacagaagtcatttccttcctgtggtacagacatgacaccaccctgtgggatgaatggggattcccatgtttgctagttacatatggccaagcccttcagcctttctgccccacttccagtttctttcttgggtgggaatgccttgagcctcagttaattgtttgagttttcttgagtataaaaggaatcctggctgggcattgagtgaatacaatcataaaacccaaatgatgctgttggcctcatctgagctgagagtggtgttggcaccttcatagctgacatcaaatggatctccaagcccaaacactaacagtggaaccagctattgctgcttctggtgtatcatccaaatgggttttcccagccatcttctggtgcatttctaacatacccttaaaaggcataaaaaagtggcatagatgatggctggaaagattaagttctttctggtggcttctttaattttggaataaccagccttccttcaacccccttacatgcattagaaacttctgaactgtttttgttctgtttttaattaggttgtggtacaagaggagcaattaataaaaccttccatttccacatctactgtgaaactctgtgacttcttcccgtgtgatgatggctaagtgcgcagaacatgtgaaatttaagtagatttgtggaaacagaaacacatttttatttagtcrtgagcgtcacttggagtakaaatagagccctytatgattcgtgtgctggtctttcttcctggagggcttcagtattatctcatgctgtcatctttatgttgtattggaaaaatctgggattctttttcccttggtcattatttgctttttaaaaaataatgtagttttaaagaattcttgctatttaatctcaagcccaaacatggtttttagtgaggaactgatacttaataaagtttgatatttttagttctagaaagaattgttttggggggtgggaggctgcagttgagaggtacaagaaatgttcaatgaggggaagacactctactgtggttccatttgctctttgaaaacttgtgtttctgttggaaagaaaggtttgattttggaagttttaaatgtactgcatgatgttgctaaattttagttcgttgctgggaagttttggatgagctcatttcataaggatttatgtgccttataggccagtgtggggtaaggggtggagaagcttgcctccttcagaagggtcttcattcctagagggatatggaatgacccactgctttttggtgggaaacgtaaaggccagtcagcttttggatgaattttcaaggaagacagcagctgtccatcttcagtcttgacttgccattcccttagggagttccttcctttcacccatctttttctccccatggcttggccatgccacagtggtccctcggcttcaacagtcttgcttgcttacatctactaactgggcaagagagaccattctcccattggccctggaccaccactctgatttggatttagatgggctcaggaattttgtttggaatccttttggccttaaacaaaataatgatgagagaaatctgcctcccataagtcataatctcagcaggctcctgtgtctgagctatttctgtatccaggtccccaagagggctacagggaaaacttcatcatgatgggagggaagaaagaaggtaaagtcctaagatgtttgcttcctattccttgtaaggtttagccatgtatagtcatgtgccagtcacctagggctgagaaaggggagcaagcagagagggagaagaggaagaasccaaatgagatggktcgtaattgattagtggaagttaaatmatgttaaggataggaggcttgtcccctccatcatgatttagtatatcatccttcccaagagaagttttgagaacttgtcctctggtatccaggaaatggcctccccagcagtgtgcatagtcccagggaagccgtctcatgagcccctccttctcttgactcctctcctaatggtcacatggtgccaccactctttcaagccaagtcaaattgcatgcagcagaaaacccaaataagtttatgcagtagaggtttattctcacaccgaagtaattcagcattggtatggtggctccatggacttcaaggatcaaggatcctttcctctttctgttccaccatcctcagaacatggcttccagtttcaaagttaccttatggcccaatgtggctgttggagctccagccatcacatccaaattccagataggaaaaagaaggaagagagaagattacaaaagaaaattatctcccagctaatttgtctttatttatggagttttcctggaagcctcacattatggtttctgcttgtatcttcttgaccacctcttctccaggggagactagaaaatgtcttttaggtaggcatattgtagattggaataaagttgagtttggttaaaagggaaaagtagagaatggatattggttaggcatatagtctctgccatggtctagaatatatgaagaacctcatgtgtgaaccttaatatattctgccaaatattctgtttataatatctaaccctcctatcagatcctaggccatttggaagccaggagcttatcctctcctctttgtatcaagccaggggcccacatgttggagttatagcccatctttgttcaattgattcagattcagcccttgcctcccatatccctcaccatggatatgcagttataaatgatttcttgttaagcatttttaaaaggttaacttcttcccagagagcttttacataattatccatttaatgtgtttttaatgataaagaatctaatagttatcaataatgttggaaaagtaattctaggcatgaaaattagcagtatggtacatatgaagtacataccaagtactacctgattccagatattaggaaaacaagacagaagggtttcaccactagtcagtatcagtagattgttggggagaaatctttatgaaaaatgccacttttcactctttttttcaagtttgaactgactgtggaaagatgggagatgtctgagaaaacttgtgtcagtacttcatgtttgtaaaaggacagggaatccttctgaaaatctagttacataaatttatgttccaccacaagaaaaatcagtggatggctggaaggcggggctttcccttttgctctggaagggaaggaaactctgacagccagacttctcagtcggaaagtgtctttggtgagccttactatgtgactggctgattcactttgtccgctaagtcttgggagaggtgatgtaaccagggactgcaacttctagggaaaggggaaaaatcactgttggccccaccctctagcattggaagcttaacsrggctttggcccacagcasatggaagtttgagctgtgttttgtaattcttttttaaatgttcgccagagcatccattattcttcctcattttctcttctcctcttccctccttttcttctttcttaccttttctcttttttatcctggatgtgctcctgtatggccattctaaatcaactcaggtctgacctttggaaatacgtacagtaataaggaatcctaggggcttcctgctgtatttctgtttttgaatttgattaacatgagctaagaggttgagtagaaagaacttggactttggtgtccaaaagacacgggtatgaattctgactctaccattactggctctgtgactctggacgagttgctttacttctctgactctctagaatctcacctggaacttgaggttaattcctgcttcaaagcgttgttaggaagattgaacaaaataatgtgtgaaggaaaacccagcgagagggatgaagagcagagtgtgctgggctacataggctaaactaagaagtttggattttatttacagtgctctgggaagcagggaagtgacctgatattgtagatattttcaaaaaatcactstgggcctgtggagtgaatggaggacaggagctggagtggaagcagatagcccagctaggaggcaagaacagtggacaagacggctggactagtgtggtcacagagggaacagacggaagcagtgattcttgagaacttttggaggtaaagacactaggagtagctgaagtcttagatgtgaaaaagggagggaaagagaacactcaaacatggatcttaggttgggtcttgagcgcgtgattggtgaggactgtttgacagtgtagcccaggactgtgcatggggatgacacccacaagatgttggctggctggctggattcatgactatctggaggaaagagagaatgcgtgttcttaggccatgttggatgctgaatgcagtgggacagacccggttctatttcttgctttgaagagattgtgttccaattatctgccctgtttagatggcagcttccagaatcaagttggtcagttttgagcaagatctggaaagcaagacaatgtctcaaaagcatcaggacccctgatatccaccttgttaacaccgtagatgacttcggtgccctccctgcagccgtctgctttaattgtcagaacaaagtgaaagcgaactcagagtgggacttgggatgggctttggaactgagcagcattctcaaagctgggtgctgtagtggcatgactattacaggtggggccaggaccccacttccacaaaattcaattggatacatctggtaggaggtgttcacctggaaatctgggtcttaaaccactttgagaaacactgtcctggaggtaagcagcccctgttctggttctttttcttccactttttaaaaaggaaatcagtttggtggcaaaatctccccttcctgtccataattcagactacgacagcaattagaggcaggcagcctcccctccaaggagaaagaaaccctccacgtgttttatgagtatattcctaataatgacaatagcagcaaacaaacaccatagtggtgatttcatactcatgaaattattgtcatggagttagagcctagataaaagtgtttggcaagtctctaaagcatatttcaagagaaaaaggaggccagaatttatagaatctaaaaatagcagttgaagtgcagctgtgtttagcttgtcagagaacctgttgagtcaagatgggcaggggattttatttctctggccctgaggtcatttgtcttgtttaagaaggggcagcaaacatttccaaatagggattgacttttaaggggaggaagatggctaaatgtatatggtatttcttgttttctgctcttactcttcctacctccaaccccattccaaatttcctcttaagaaaaggaaggrgagtttgtttttctcagtagagtaagtagtgactgcctaggtggcaggattttggatggtagtggtgatgttacttattgatggcacatttgatgactgttagtccatggagtggtgggggtagactaactatctggtcttagtgggttctgtacaatcccattaagttgaaggaataaacctgtagttggagaaataacagtgtgacttctccaagactgattggctgayttttggaccctctttgtcccatttctagtcaggaattatgtcttctactgttccacaacccacaaaagaagatgtctgttccacttctggcctaagcaatcctcaagcctctatacttaacaacattggaatgtcaccatcttaaaacttgtcaaccagtaggccttcaaacctcctgccctttaatatttattgaaaccttggtggaaatgaattctgtttttggtggagtgcgtgaagttatttccctccattagtttgtaggccagaggttgaaaactagtggcccgcaggmtgagtcttcctcaccgtcccactttgcttgcctggcaaagtgttaacctatacaattgccaatattggaaaactgggatactttgtttacaaatctttatttctggattctcctgggttgctctaatatatattcttggtttagatttcttttctggagaggtgtccccagactgctgtgcataggtccttgtcctcccagagtagctcacctgtgggtcatgatgagaaatagccactgtattttatttgaggataataagaaaggggttaaataaattgtatgttgagcacctagaaaacatatgcatgtgcatgatgagcaccctgtaagcattagctattattgctatcatcatcagcatgtttaatgtattttctgttgagggttccattgaggacattgttcatgacataacccaatgtcttatgaggcctcatgaaagacatgtctgtcagatctcagttccagaaaatagctgtccttcttctgaattactggttcatctgtaccttactcatgcccccaatcttatttctatctttgcactagctttgcagaagctcagaggcaactatgtagttcatgtctagcaggaggacttggattcgatttgttgatcccttggtttcacatgccataatttccttgcttctctacttttctcacttattttgttgtgagcattattgtaagcagccttaaatcctgttggaacaaggctgggtgtaaattaaaaaacaaatcaagcatccattcctctgagaggttatataatcactgagaataggcttccacatcaggacaggtttcatgtcttagccttgggactacatgttttctctttcccttctggacactactgacctctcattgtcatgttggacttgattctatcagttgtgctcatgctttcccttgaatctagataacctgtaacttctgttacagaatgagatggcttatttccctgggtagactgactgtattagtcagctattgccacataacaaactgccccacaactccatggcacacatcaagaagcatttatgttctcatggatctgtgggatggttggacagttctgctgcaggtctgcacgttggctggggaagctgttctccatgtctcttatctttctagaaccagttggctactggggcaggttcttctcatggtgatggcaaaaatkcaagaggggcatgcagaaacatgtgagacctcttaaggggtaggctcagaactggcactatcacttctgccctcattccattggccagagcaagtcatgaggcccaatccatcagtagagtggggaaatagagtagaaatagatcagcctctagtgagaggaaccttagagtcaatgacaaagggtaggagtaccaggtggtgggtagggggcagctgataagtaatgcagtctagcctgtaatcccagcactttgggaggccaaggcaggtggatcatgaggtcaagagattgagaccatcctggccaaygcgatgaaaccccatctctactaaaaatacaaaatttatctgggcatggtggcatgtatctgtagtcccagctactcgggaggctgagtcaggagaattgcttgaactcgggagacggaggttgcagtgagccaagactgcgccactgcactccagcctgggcaacagagtgagactccatctcaaataataataatattattattaataataatacagtcgatcacaggcagtgtaattatttgaagaccataaggttgggcatacagcatagagtatctagcccttagtggctatgttggctattctctacttcccctctccagatccattctccaccattatccctcctgctttgtgcccttgggaggctgaccttcccctctgcctttwagttgggttcagtcagaggggagcactggaaaaagagggtggaagagtggccagccatagtgaccatggctctctacggaaggccatagcttctgycaggtggttagttctaataacttaggggttccagtgaccactccccaccttgctccttccgacctagggcattaatggctccctgctttgccacaggggtctcttttaaactgaccccccttactgttgtaaatagtcccttcagtgaattctttttgtctccctggttgaaggaaacatctgcttctggccaggaccatcatggatacagtaggtgctcaataagtgcatggttgattagcaggcctccttgtttttcctctcctctggcctctacatcactaaatggtcacttctcttctagcctgaagagcccatggaatgtcagcttgggaatccctccctctttccccataacttgtccaaccaccatccctctcccaagaacctggcacagtaaattcattagagcgaattcaaataaataaggttttacttttcttctttgggatttcttagcatgcccgttgggacaattagggagggattctttcaagtacaacattttctctagcaattatgggggttttatctcccagatgtgatttatgccatattacaytccaagaagggaacatgaagaatgtttgtggctaaaraagtctcaacacaaggaaactacaggtgaaacgtaacaatagtaattgccttactttatttgcgaaggggtggtgaacactaatatgcctgactccatagagcagtgtatttggttttcttaagcaggaagaagggssccccccccaattttaatttactgaatgagtttaagaaccatggtgtatttcccaagcttcgctagtgaagatggtattttgttaaaaattgagattcccattgatccagatccagttgggcctgggaatctgttttcaacgtgtatcctgagtcatatttgggaagcactgggctctgcttatgattctcacgttctggtctgtgactgaggagaygtgccatgatgagagtgatgatggtgatggtggcagacaagagcatgtcacatttagaaatactgtaactggttgctgaggttttacatatattcyttctgagcttgttttgtctaatattgcctgtgccaacagtattttaccagaattgaatgaaaagaaaggtaccagcagatttttttagatgttctaattgataccagaagcaaagacgtagaaaccgtcatgttataaacatgaaagccccaagcaaacagcctttagcccaccctttgagaaccactacatgacttcttgataagattctttcaactttaccctatgcctggatcatgaaagaggtgtttctagaaagctctgcaaaggactttctctgacagacggctctaggcagggggaagctctgactaactgatctctggagaggaacacagatgttccctcctaaaaaaggacatgctggccttgctttcttacaggtcacgaagtctcttttaggaatgccatttggcatttcaagtttctgcagcagttctgcagaaagccatgcctagaaaatttataattactctgataccagatggctttgcggccttcagtatcaaatgcattgtgattgtgctatgagaattttggggggaaaattccaaactttattaattattgtattggggaaaacatcatgttattgaattttaattagagttgctgggcagcctgggctgccttttaacttacgggtcacctggttattgcctgtgaggctcactgaggaaatgtcttgctggcaaagctgagttcgctcagaatgtggactgttccatttttctgttgtccaacacttgctttgtttgtgacatttagctccttttcttcctttccatcccaaatccacaccctttcttctgtcttttgcaaaatctatgacactgttgaatgaataatataagcccaaggacttggagggatgagagctgtgatgcccacatgttttagtgttggcatgtttccctcatttttggggatgccttgggttgaagctgatttttcagcatccctggtttagcatatgttgcattatgtatctgggaaagtagcatatctattttctcattttgcattacaatagcatctagtaacattcaagcctcaattaattgaaccaataattattatattaaaaatggtatgtatgccccaggrcagagrttaggctatggtgggcatttgagaccttagggccatagaccccgaaacatgcattctccagaactgagtatgcaactgtttgctttcgaccttacagcacaggctttgggagaaaacagttacgttcaggtcctaactccagtaatgaatttcaagcttcttgttattgtttttcttcctgaaagacaaagggagttttatgccatggtattttgaggacaatgttgaatcaattgttatcaaatgggaagatttctgaatgctgaatagtttgtaatatccttcaaaaaaccaaaccaagaacccacccacccattcaccatttatctctccatttgtccacccacccattacccacccatccatccattcacccatccatttcaacattcaccagttcctacaaggtactgagtactgcatttatttgctaggggtgcaaaaataaagtctaataataataataaccatcatttattgagaacctactatgtgttgagcagtttccaatcttcaaagcagttttgtgatgtaggaattatgttctccgttttatgagagaacagaagctaatttacttgcctgggtcaccaggcagtcaaggcggagcaggcctgaggcatccttgcaacattagaaccagaacaacatttcattcttttatgttaaacggactctcctgcctggacccaggcccacgttagcatccagagtggcatgcagtggcagaattggagctggaacagccctcatttgttgtcttctctccttgggaaatcttcctgctatcagtgaaaaagggagagggatcagctcttgtttcttggctttgctctttacagcctcttagaaacttgagttctatctggattcatcstgtcatttgatggtacaggagtacaaatggaggtccacttagcgaatatctaaatatttaaagattacaaatcaaggtaactgttcagtaaactgtgttccatcctaccttgacaaatatacctttataacaacttggaagccctaggttgaattttgatttctcaggcctctcagagtttagtgtagaaatggatggcttggggagagccagcccccagcccacccccccacttccctttccatctgactccatcccgcatggcaatgggccttctgtgcatgcgtgtgtggacacccatccaagcttcgtccaccccctccccacagaggctgcccttggacctcaggtagggtacactcactcatggtgcactttacagtgcaggggacaaaccctggagtagagcccaacatggaccctgaaggaggacttagggctgttggggcagggatttctgttgtcctgggcacacagagcatatctgcaagagggagatgtggagactgaccttggtctcacaaactcattgccccttgcaaagaaataaccaggagggtctcctgagaatggggttcagagtaagggcccctcttgcctgggtcttacccagggtgataccatttctgccaagtcagaggatgaaagggacttcggcggaagccatatgacccacctctgtcattttagggagactgagcatggctggtaaatctcagtgatggctggagccctgggggtccttagtttcccagcaagtgccctgtcctgctcttgcctttctgagcatcatcctcgtggcattctggagcatgaggacccaaggctgggtctgagtggatgactgtagttacgtacacaggctctgctgcagggacaggattacagaagatgtttacacaaagctgtagctttggaaacaggctgtggtgcatatcttagcagccccactgaccagcttggtgatttttgttcaactggagccttggcttcctcgtctagaaattggagataaaatggtatctgtaggtagagttgtgtaggtggaagatgagatgtttgtagaaatcttcatacagcacttggctttcccaaagggaacatcagcgaattgtagccactgtgactggagctgctactattgttcaccaggtgtcctggaccccactgagaagacgctgccattcgttcattcactgattcacccactcaaatattcatagagcacctatcatgtgcaagtactattctggtagcatgggacttaccagtgaacaagagaagcaaaattccatgccatagtggagctaacatcctagcaggtagaggcagagataaaccataaacataattaacatggagatatagaacatatggaatatagagtatggaaacacgaaagctgataagtgctatggaaaaaggtggataagggaaaggggtttggttgacccaaggtgggctgtaattttaaatagggtggttagggtaggcctcatgaaagaggtttttaatcaagaacttgaaggaggtaaggggagagaaccatgtggagggatctgggagaagagcattccaggcagcggaaacagccggtgcaaaggccctgaggcaggagtgcctrttgttccagggacagtcaggaggccagtgtgtctagagcagaatgagggtgtaggtattaagagacgaggtcagagacatgacagaggcctgaccgtgtagggcctagtagaccattgaaaggacttggcttttactcattgcaaagtacggaggggacaaatgacatgaccttctgcatctcctcccacgccttgggcccrcaggctgcctctgcactgttagtcctccctgacttcctgccccaggctcactgcccccatccatgttgcacacccctctctacctgcagccgccatcccctaacaggtagaggtgtgccctgggtccactccctcaagtcccagctgcattaccagccaaggatgtgatgcatagtattctggagctcctttttaaaaaggagttacattgctttgggagttcaggacacaggcagcctgggggtgcttgcttcatttctgaaaaagcaggttgtggccaccctttcatgagccttgactctactgggctctccctgctccccatggagcctcatgctgtcctcaggccaccctagccccctgttctcctggctggctttatcccgctgagcagtgggacagaggacaggaagatgagaggaagataktccagagctgggtggagagtcagggtggagtagagctgtgtgagggtgtgcatgagggagccaacaggaaggagggctgggttcttgttctctgaccaattcccagtcatggctctcccatggggtttcacagctcagtccgaagacacattgttcctgtgcatggtgtagccaagcccaaatatttagctacggccacaccagcccttgttctgcttataactgtggtgtagacctcagtccagacaccctccaagagatacccaccctgccccttggcactggcttgggcggccttgtctggtgctggaaggctctcttgggttctttgccaaagttcagatgtccccctttcccactctgtgggtgggccctagtgggggatggatgagggctaaggcatgctttacccctggctcccaggcacagagatgagggtggcctctgggtcagagggcttcctgttgagtcagagcctccagccgatatgcctactgtcccacccctactccacatagatgcagggcaccctgcagctttgtttcaggaggaactctgccagtggaaaccccatgtccttagcgcagccctgggggttatcagggtggctcagatgcaggaagtcctcgcctctgctgtcctgctctgccccaccctgtcctgcagaggggaggccctgcccatgggagagtctgcctccactgggcagtgctggcctggaggaaacttccatgccacccctcctgcccctgggctccagggctctcgatttttggggtaaacagaggtgctgggctctgctgaggataagctttgtgatctgggaaggatccctttctcctcattttttccccacctccttttcatcatgtctgtgtgaaaacgaaagctattgtttatgtaaaaggaccatttgcctaatgtccctggaatttatttgctggagcattttccattttcatattcagtttagaccttggctgaagtagggaggttatgtaactgggatggaacaaatcycattggcatctggggaccctagtgtaccccacccttagccattcctgcagtggactgagtgcccccctggctgtatattcaagtcgcctctgtggctgccagagttggggagctggggagctggagtgatagagaaggagttggcagcatttagaatggagtcaggaggaagatttctctggggggttggattcatagatctgctttggggctgtctcctcctcctcagctgtagacctcgggggtccagactttccttgcacacaaagcctaggcctttcctatcagcctgtctgtggaccttagccaacagcctgagcctcactgcttgagccttggctggattagggaaatgtctctggcactttccttcttggctgtctgtggaacctgtctctacattctaacccatccccagcagcactggccttgagggccatgtttctacccctgattcccagcctgagcgccttgggtttctcctcagaagccttgtctgggtctgcatggaattactttgacaaaggatgggatgtttttctaggttatgagggcctggacatttgcctgcctggggttttaaaagaaggcaaatatatagagtgggttttggagccctgaacttagtcatgggtggataggggtgggctgaggagggggtgcaacctctgccttccctccccacrcccccatattctgagatggtagagaaccctttcattcctccagcctgtctctttcatccctctatggactgagacatctccctttacaccagttttttacttaaacatgcttattagcctccattaagaaaaaggtaaccctgtgtatacctgtattaacacaatgctaactgctgcaacaaaccctcagttttcaattacttgacctactagatgtttgttcattgctcatgtgtcagtcaaataaggctattcctcgttgaaggtagcttcctccacgtggtgattctgggactgcagttgctttccattgctgctgctgcaattccttaggacctccaggatttctgcctcctgggggcaggaggagaaagaagcagtggagaaggcacacccaccccttaaacactccagcctagaaatgacccacatcccttctaccgactttccattggtgggaactagtcacatggccacagccggcctcagaggaggctgggaaatgtgggtccaggctgggcaccaccttgggaatgactccacatatcagtggtaggagatggagaggagggggtgtacttgggaaacggcgaggtcaagtcagcagggtggattgagaatatgtagggggacgaagccaggagtccaaggaccccttgggtttctggtttggagaacagggtggatggtgcctctgaaggcaatggagttaacaggaagatggacgatgctgagagggaaggctcatctgtcaagtgcccagcaggggtgggtgctgtaagaatgttttgtgaatgcaggaatgaggagaaacagtagtgaatgaacttgagtcccttctgccaaccccttgcagctatagtggagaaaaactgtttggtagctgtactccatagcctgaaaccatagcacctgatgaaattggaccaatctgttttcaaatacaaagctagtagttagaataaccagggggaaaaaagcataatcagtagccccatgtctttgcacaggctgccataaaaaaaggtacagttgtttctcagtatgcatgggagattggttccaggattcccaatggataccaaaattcatagatgctcaagtccctgatataaggtggcatcgtatttgtatataacctacatatatcctcctgtatactttaaattatctctagattacttrtaatacctacarcaatgtcaatgctatgtaaatagttgttatactgtattttgggttttttgttgtattgttatttttattgtttttttcctgaatatttttgatctgtggttggttgaatccatggatgtggaacccatagatacagagggctgactatcccataaattgggtgggttacacaacagaaattaatttgctcacagttttggaggctgaaagcccacaatcaaggtgccagcatagttggtgtgtggtgtgggctctcttcctggcttagagacggccaccttcgtgctatgtcctcacatggcagggagagagagggagaaagctctctagtgtctcttcttatataccatcatgaaggctatgacctcctctaaaccgaattatatcctgaaaggcccatcacagtgggagttagggcttaaaaatgtgaatgtggtgttggaggacacaattcagtccacggcatccagtggcgatgtctccccaggcatagagtcctcttctgtgttgggtattgtctctctaagctgcggggaaagggaaggcagcagattggtgtcctggcccatccacttcaggtgagaaggatgcctgctgtcctcgtgtggacacaacttcctctgctctccttggccttgccttggcctctttgctttaggatatgatgcccagaagggctcgaaactggagtctgaccaggggcaagcaggctgcctcttgctcctccccagaaagggagagccagctgagggtgacaccttgggctgcagccacaggccactttgccactgggctcacccacgctgctgctgccacacgtggggccaagggtgacaaggytgccagggagcctgggatcggagttccagggccatctgagctctgggtcagcagcagtcattggagcagggatctggggaggcttttcacgtgggggttgttgagataggggtctggccccattcctgcctgactggcagtcttcattaatgtacgtttataccaggagcaagtggagctggggaggggactcacatctctgtctgtgggaagcagggcagagtgagggagagtatggcctgctttctagctgatatctccccttgctctcagcaagctcctctgcctcttcctttccttctggtaaagcataaggagaggactcaacagtaaggactaatatttgacagtgaggagcagatagagttttttaggcaggggtcactgttaaggaagtttgtattttttttttaacttccaaataaagcttgaagtgtctgagaggctgcataacagaggtgaagggcacagacttgggagccccatggccaggatttgaatctgaactcttaggcaggtccctgaactgctcagccctcagtttcccrtctgtaaatggtgataacagtaccttcctaaggtcattatgaggactaaatgagtaaacattgatacagtgctaacaacgcttaatagagtacttacaacacttcacttaataagtgccatatggtgggtgttaaatatatattttggggaacggggtctcgctatgttgcccaggctagagcgcagtaactattcacaggcacagtcagagcccactacagcctccaactcctgggctcaagcagtcctccttcctcagcttcccaagtagctgggactacaggcatgtaccattgcacccagctaaatttttaaaaattaagtcttgttgaagagtgagtagaaaccagagtggtgataatttctggttctccctagtcatctccctcaagaatttcccagttacttctcctggaagatccgcttccttgttttgttgtttttgtttttgtttttgtttttttttgactttgagacaggatctcactctgacacccaggcgggagtgcagtggtacagtctccgctcactgcagcctcarcagcccaggcccaagtgatcctcccacctcagctttccaggtagctgggcagtgtcagcagctctcctatggccagctccaccaccaggtcagacagtacccttggcaacctgtggaccaggctggggaagaagaaaatctaggaagaaaaggccacacaaggaagaagtgcagatggcaggggattccggtggccagggaccagatgggagtccgaaagctacacagagcaaacaaccaaaattgaaagcaaacagactctgagttgagaaacctgttctccctatccagagcatacaattcagaaaatgccggaacagcataaacactgcaaaacaaatccagctatgtaatccctttattttagtaattagaggtggcactgggaatgctggtaacagtggagtttgactcagatccccttgacctcacttggcttttcctccatgttccaacaacttgttaagtctgcttctccattccattcctttcccggcgtggtgtttgggtttgtaggcaggatggccatgtatgcacaaagaaagctttggggcagtttcctgccacccagtttttatgaacattctctttgccccatgtgtggcagcagaaggcaatccagccctcagcctggaccgccgaccttgtgtgtttgtctccctctgtgcctaggcccgagaggccattagaagccccatttgtgtgtctcagcatggcaggaaggtcaaaccgctgcttcctggttggaaatggtttcttcattgattcatcaggtcagtcaagcatttactgagcacccactggagccagcattgtgcaaggtgctaggaatacagtgatgaggaaaagcagacatagaccttacccttctgaaagttccactaaaaatcaaataactgtgaacaaatgtccccttcctgctgtgatacctgccataaagaaacatgttactattaaagtataaccagatactcacatgtgacattctcttgttggttttccctgagtgcaaaagaggtggtgagtctttctaaatcctgagtcaagatgcttgaccacttattaggacttggacccttagttttggacccttagttttggacccttagtcccttatcaacatcgaaggtacagaaggattgacatcagagaggcccaggaagtttgacattggagagaggcgtttttggagaaggctgatgggctggggggtgttttccgacctgagccccttggaggagagaaaagggtgttcttcctccagcccagagaaaggaggagaccagacaggtctagctcctgagagctagcctgactttcttccagagtcttggagagcacaaagatgtgtgttgatgtacagcttaaaggggagttaatggagccctgagaatgtcctgctcccccggaggaggacatatgagtgcatctcagggtgaaagctggctaggagctatttaaaaggggttgtaccttaggtgaccctagggagaggtgatgggaccatacccaaaacacaaggggtctggggccagcggaggagaccttgttccctcttgggagttgcaggggagtgtcccaatgctcaggaagctccagggaaccttcagtgtgcctgaaaaaaagtcaacctggaatacccaccaagctaagggaggtcagcgtgcaatgccacaaagccacagaagtctctagagcgactcagctttaaacagctgccatggccagagaaaagccaacacccaaagacaccagttccaactaggtgtggcttctcctcccctcctctcctcccctcaaaaggtgttctaagcagctgctgggaaagggggtgagaggaagtgactgcagcttttttatctcccacttcccaccctctagcaaccttcaaagcctgaagtagggccaagttggaagaggcgaggaagtttaactttaaatgaaatttggagtttttcactaatacgcaggactggtcattttgatactgaatgggattattctggagattaaagcaatggaaagacttttcatgatctaagagtgatccaagagatagtgggacctgctcaaggtttcatccaggaggccagggagaaagggccaacctcagtatctaagggttaagggtgtgcaagagagtgcaatcagtattgcatttcagcagatcagccaagctgcaggataggtgacagatatgaaacgataaatgtggaggcagggagaccaggtaagaagtctgcggtggtctaatggtggaggtgaagagaagagggcaggctgcagaaaaggcaggatacgaggtagaactcccacagtttcctcatctctattgtacatagtaatcagggtctaacatagcttccctttcccacctacgacctatgaggtgcacctgtccgtagtaagtactcagtaaatgactggtgaatgaatgtgttttaaataaggtatatagtgagaaaagtgagcattggagtctatttcagttatgtgttacaataataatgctgcagaacaaactcaaaacytcagtggcatayaatacaaagcatatagtttgtgcagctgggattagcagtggcttggctagctggctctgctgatttgggcagggcttgttcatatagctaggggtcagctagctgttggttatctagactggcattggctggggtgactggggcaactcagcaccgctccatgcatatctcactgtccaacaggccagcctgggcrtattcacgtggagactgagaagcacgagaaggcagaattgggcccttgataagatcatcctaacacagaggcagatgtagatttgaaccctatttgcaacagtcactaatcatgtgatcttcggtgatttattttacactttgtggcttaatgtctttatctgtaaaatggggctaggaaaatttatctcactgggtagtcaggattacataagagtaataacatctcattcccactataccatcctgagagggtaaataattctgcctatgacgcaggtatagaaataaaaaagactatgaaaagattaaaaagagctcaaatgaagggaagataattctaggcagaagaaagagcatgttcaaaggctgtgtgagtgaagaggtgggagagtgtgctgaaaggtgggcagaagcctctctgccctgggggaggggatggtgccagggagctctaattgtattttgctggcactggggagccatggaaatttctgtaggaagggagagatttattttattccacaaacatttatttggcacctatgatgtgcaaggtattctttaagatgcttgggagacagtagtgattaatcaatgtccagtgggagagtcaggggggtcaggaagatcttggcacagaatgaggtcagagtgagagaggtcaagattggctggccaggggtattagccctgagatacactgctgctctatgggattttgcccctcattcacaagcagagggcctacccttaggccccaagtgtgtcaagccccctctgcttacaaaactttatttttcacaaccaaaggtggttcataatggtgggctgaggaggaagcaactgaagtaggggaagctcagaagtctctgagggtccttcccaccaggaatctccccacttgaacctaaggctgggacactttggcatgtgtgttttaaaggatccgtgggtttgtggggagggctgcaccagtgaccagttaagcccagtgggtgatgcctttcctttgttacttttcatgcagacatctggaaagaatttgtcaagaattataataaagaataccacggaatgaaagcaaatgtggtgagaagcagagttgccttaagactgagaagccagcaggaatggctgctgctaagaacctcattcttataggaaggattcagttctttccctgagcaacagaagtgcataggtgcacggcatagtgtgtcagttagcatttgctgagtaacaaaccttcctcaaatttaatggcttaacacaacagccatttattattgtgtataagtctctgggttagctggatagttctgctgatctgggtggggcgtggctgattttggctgggctcactcatgtgttagggttcagcttgcaggctggctggaggctggctcagtcagatgttttagagttggctgaggtgacagtgtggctgggccaatgcctatcatcatccagcaggctggcctgggcttgtttacatggttaggaggttctacaagtgagagtggaagtaggcaaggccttttgaggcatgggcttcagaagtggcatgatgtcatttcttacacattctcttggccaaagtaagttcaagggatgggaaaatagcctcttcctgatgatgggaggagctactgtatcatcttttcatgacacatatgtagggacaggtagaacattgtggtcatatgcagtggactgagcccatgggctttggagtcmcatggggctctcaagccatgattctttacttaaccttcrtctataaaatgaaaacactgatagaatctatctcacaagatcattttgaggtaaatgcacatrtacctaatgcatagtaaattctcagtagaaaataacattttatgtattttgcrtgtttctcataaactgattgtgyattctaattatttagtttggaaaatgtagtctctgtaggtttacccttccctgaggcagtaggggagatcatcacctctgtaatggtataatatgaactcaggagttgagattcgtaaagcagtaaggaatgcatagtcagctatactggaaatwtgrgaaagggaaatggactatgtgggaaagcgggactcttatccttgcagaagtcactaygaaatgaggctttcagtaaacagaagatgggcatttcatcctttctcattactgagccttcctcaagacctccttaacatcctaacattataaatacaataattttagaaattacttagtcaataaaaaataagcacttattgtatacgagactctgttctaggagccagagatacagaggaataaggaattaaggtatttctcccatattcaaggacttcagtttcattacctgtccagaaaactatgagaaccacccatcacctctggttatagattcttaagtgggatgtcaagccccttccctaatgatctcagtttaacctgctgtcctattcctctgtggcctattcctgtgctacactcgagccaaggtggcctcttccctagccccacacatactctttgtttttccattcttccaagcaggcccggagaaggaatgggctccacgatgcagggcccgcggtagagaacagccaggcagagcagggggcctggctggatgtggccascatctgcaggggttcagcattgagatatgacactgtcacctccatctcaagaagcccttacggatgcctcccttcccttcatgactcactgtgatctacaactcctcagagccagccttaaagtggtctgtggatcagtctcatctccccactggagctccatgggcagaaagcactctttctcttctgcctacaacatcctcctcccatcggtatgcaccccttcctaggagccccacaggcaatgacaggaacccccaaccccatgtgtgcacatatacacattcccacatgtgtggggaatgagaggctacatagcctgctccatcctcttcttttaacctgcaattactgggtgaaaagagtaggatatagtaaaatgcaaatgctagtttagtaaatggcataaagacattgaagtgtccctggacatcagtcacgtggctgtggaagggagacttagggtgtggctttccccatggaccatggtgggtctttgggatccctctcttccccaccccagtcctttaaagacccaccagcgactttgtgagattctagactcctttccctcgtacctcctagccttattggatggaaaagagggaacagtggttcctttctttctgccacgcctccaccttccattggagactcctatttctccctccgtgacatctttgctgaacagaacagctcttaaaccagaccttatctgttccatgggtgcagaagggtgcaatgtgaacagaaacagcaagtctctggaaaagagctccttcagctgcaaagaacacagaggtcaggaggaataaagctaatgagagagcagagagtcctttgtctccccaggtgttattcccagaggscaactagggaaaatggagatggggtataaacatctgaattcactgttaaacactccatgaactgttgataattccctagaagcagcatattcctgaggtagcttcatatgatctccagaagcaacttacatgtagacatttttctgagaattccagaaagaatattgataattttcagacaccatggcttccacgcctcatcaacatragcagtattagkctttatctctgacatcaatcaaacttgaacaccatcagcatgggctttaatgaaattctcacatatgtatcagaacttgtattttttcctttagtcagtgtcttgatccatttgtgttgctgtaaaggagtacctgaggctgggtaatttataaagaaaagatgtgtattcggctcatggttctgcagggtgtacaagaagcatgatgccaggcatccgctttgggtgagggcgtcaggctgattctactcatggtggaaggagaaggggagccatcgtgtggagatcacatggtgagagaggaagcaagcggggagtggaggtgccaggctctttttaacaaccagctgttgtaggagcacagtgagaactgactcactacctagagaatggcaccaagccattcacaatggatccgtccccatgacccaagcacctcccatcagacccacctccaacactggagatcagatttcagagtgagacttggtggggccaaacaaatcatattcaaaccatagcaattagaatcttaaaatcaaaattgatggctttatttttctaaaaatgggaaaatatctccaaaacattgttcaaaaacaaaacaaaacaaaamaaaaatgtttgtycttatatcccatcagtttattcaactaacattcactgtggactttttataaggcagtaactgttttatgaataggagatataaaactgggtgaaacagtgaggttcctggccactgtattgtaataatagaggcacatataccaaagagctaaaatacaggcagcaaactctagggactgaagtaaatttccttaatttaatgaaatgtatcaagcagaaacccacaataagcatcatacttaaaggattcatttgaatttttttatttatttttattaaatcagatatacttttctagtttttttaatttttattttttgcatttcttgatcatttcaaagtgaggtcagttacagagtgaatgggttcatcctgtcattgtaaataacagtttttygtttaataatggcattttgtattaccaagaccttgcttcacattaggtgtttygtatacattatctcatttaatcaaaaccagcactctatatcatgggtgccaccattcctctgatttttgctaaggaggaaactgaggttcaaaaagggtaaataagttgtccaagaccacacagccattgtttggcagagctggggcaaaggtctatactgctgcaaagcttgtgatttttggctactaccctctaatgttctgtgagggtggaacacctaacctagaatttccctgtggatcactcacccccaatgatggcatgtcttgctctggacccatgatataatgatctggatacagccaaagtcactaagcacgctacaccctagcctttcaattcctttattacttcatggagaatcatgtatttcagccactcaagtatctttaaggtctaggccttatcgaatggggtttagtcactcagtacagtctgccctttgtactcatgagttcagcattcatggatttgaagaactgtggggtgaaaatattccaaaaaaatggatggttgcatctgtactgaacatatacagacttttttcaatatttcctaaacaataaagtatagcaaygatttacatattatttacattgtattgggtattataagtaatctagagattaaagtatataggaggatgtgtgtatgttatatgcaaattctacaccattttacatcaaggacttgtgtgttcttggggtttggtgtcagggtggtcctggaaccagttccycatggacattgaggaatgactgtgcttcccctacccaayagaagtggttctcccgtcaggttataatagggaagggatgtgtgatctttcctgagaactgaggcatgctattaagctttaaatggagcatctctaagtttccttaccaaaaagtaatcagacaaagggccatgtggcaagagctcttgcttcaccaaacacgtagtgatggacccccctatacccagtgtgccagacatcatcatgagatgtamctcctttcacatatctcttcccttgccagaggaaggaactgaggctcagaaaggttcaattcctcacccaaaggtttccaacccaaggtttctgacctggagccctgctctttcctccacaccctgctgccattattttgtcttgttgggctggggaagggcaaagagggtgcccactgctggatgaaagaagcagctacattcccattcaaggtgtgctgagcccagtcctaactgctcaagtctttcttaggtcttatgatggaactgaaaagcaggctacctattttatccaggaagcagacagaggatacggatgggcaagcacttctatcagatgctggttctgttgtaagacatcatcaaggttcctccaacccctgctcctcatcacactgcacagccctttggcagagacagggagaagcttgttgtttgagacatctggagttagaaagtatctgagctttaaatggagaaggagtggggagaaactgacagtgaagtgtagacatgaggcttagagagatgctaactaagtagtcatgagtcgaatctcccatttagtcagacacatttttctagtttttctagttttctacccttcaaaatactttgtgttaaactcaattacagagatagatccttccattcatcaagtgaattttagaagccacacctttgggtgggtcttaaaagcagttcatgggaatctataggctattgtgtataactggagggtagcagaaaacaagttccttgtgagatcagacacatgagctaaacatttaggaaaaccttacagaagcaaatctttaacggaagggtttccacactgagggccttgtgttgcttttgggaatggtgtagaaatcacgtgcttagtcttgaattatgattcacctttactgaatgtcccttctcttttctttactcactgtcgaacaggaacccaaaggatgtagtttttggcagatgtcctttgtarggttcagtatttctcactcacccctttaagaccctaaagggagagttattaatagtttcagaaagttgagggaaatcatgcagaggttctcagatgttcagagaggcttcctctccccttccatgaaagttctaaggctcatgggtgaggcctaagaaaggcatgtcagttgtctatcaagttcattagtttattcagcttatttctgaagcttttgatgggccggctattcagaggtcaatgaaatagacatgagtactcttcacagaccttaccgtctaataggaatgatagcaagtgaatgtataataaataaataattaggggttgattgttacgagtgctatgaggggaatagccagggtgacatgtttgagaaggggtcagtactgctaagtgttggtcagggaagcattgcaggcagagggaacagcaaatgcccatggtttggaggcaggaatggtgttccaagagtagtagggagcctcgggactagagtttggaggatgagcggggagagtgggaggagatagyrggaaagtctgtggagccagttccctgaggggcctggtgggccatgctcagtgggggtttcatttgacgagccatgggaaggcttccagcaatgggggatgtggttttacttgtaccttaagaagatcacactgggtcttgtttggagaatggacaggaaaggagcaggagagcaagcagagagtctgaggkgcaagaaatgccctgtcctcccagcagactggagcraattctaattctgcctctgctacttcattcctatgcaactttgggcaggtttcctaatctctctgcctctcaactgttcacccctcataaaatgaggacaagtattttctcatgtggtttctaggacaaataagtattcgtaaagtcctctataaacttgggccatatgcttatctgagctataatatgattcatattgaaaggagggggactcctgcaatgttgggaaaacgactcagctgcccctatataaggaatatgttattacagtccgagactaaaaagatgcttttgtttctttactgccatcagtgtctctctaagggagggcggctggttaaaaatcacatggtgtgggcatttataggggtaataacttgaaatgattaaaccctttttttttaaagcttcatgtctctgttctccatctgtaggtggtgcatgagtatgatatagtgtgcatgtgtgacatgctgcgagtgtgaggaatgccagagggagacccacgaaactgccctgcaggcagaaggccacatgctctcagcaccagtcagtggtgctcgctagtccggcagattgctgtattcttgcaccctgtaccacaacattgttaggataaagtttcataagtcttatatggctttgaacaaagcaagtctatttttcatcatagtatgggttatttagaattcatatgttatgaggaaatacactgtttcaaatgcagttttctttgtggtgtctcagcagatactgagttttgctgccctgtcatccaagagggcctcaaggtgcccagagagaccaactgaaaaatgttcactggaacggagctgcaatggtggaaacgttctgtgtgtgccctgttcagtacagcagccactgcgcggctgctgagcccttgaawtgtggctatcagggtagaagaactgatttttaatatattgaattatgagtcatttaaatttaaagagcacagctgtattggacagcacagctgtagaaggatgttttctctcatggaaaaccccaactctgagccccaggggtcctatggatccatgagctcacagactcccctaacgtccatgaagatcatcaccaggatttgagggaatgctgtggtgcatactttgtgttggacagttatgggggattgcttttgccrtctcagcatttcaccgctgtcctcggtatgagattatggtgatgttgaatgggggtcattagaaggctgtccacagaggggatcagcccccctcaatgaccactactccgagcatgggctttcttctgtttgatctcgttgggccctcagctgtgactgtggagaacagcaagtcctcagtgagagtatttgtcacttcctactcttggtgtttaatatcatccctctggcacagatgcttgaaaatcaatggtttcttgacacatcttggcttgtgtgaggggccataacaatagcagggctcatggctcctttttttttttttttttttttttaaagagatagggttttactctgtcacccaggcaggcaggggtgcaatagagtgatcatagttcactgtaacctcgaactccaggtctcaagggatcctcctgcctcagtctcctgagtaactggatctatacacatgtgyccccgtacctggctaatgtggcttcctttatgttcagcaaggaactctcagtgtttgtccatttccttaggaacatgagtgtttttggaaggcctttgatgagtggcagttgggtggatggatgagctaatacatccatcatcctatctcaggaggatgcttggatttgtgtttagaaattgggtaactcagttgttcatggaggaaaaagttgaacattactcaagtgcagatagggaaacagtgtaagaacaaaaaactttttttctatctacaagtgaggaaaaaaatattgacagtgtgcccaagcttcatggtaggatgggtgttaattgggaatggcatgtaattctcttctggaatccagtgtctgggcaagtcctgcctctcagattaaggcaccagcattcagcataagagggtcctgcctctcagattaaggcaccagcattcagcataagagggagtaattgacattctacatggcaaaagacccttgaaagataacagatgaatgtctcatggccagtagcttggtttttttgcatggtgtagatttagaatataacttttacagggaagaaaggggttaaaatgtctggtgccatctgtcacagtaatgagttgtgcaaagcccaatgaaccttgtagaaacaacatcgtgcccagaaatagcctagacctcagagtgacatcagggggcrgggacctgatagatgtggtcctgcaaaaggaccgaaggttcttctttaacaattcaaattgaataggaaccatttttaatttgggggtaactccgtcttcaccattaatggccattcttcaaagctactttcattcctgtgagggatggccagacacgagaaagccaagcagggattttcagttacaggtgagcatccgatctgcagccagggctttttctaccgggcacatctttgtgcgcassctggtttgagctgatctgcacataaacaggcactctgggtgtggatgggggcatctgtgtactctttatggctatatttccagaatatgcttttaaagactgtggtcacatttaccttggttagggaagatagtgacttataaaaacctcaaacatttatgtttccctttccaatataaaaagtgttaataatttacccacttaaaaggttaagatcaaagagatcataaacacacatgaatactatttcaggaacataaaattcagctatttctactaacagaaagtgagtttatgggataccaatgcaaacaaacatagatttagtggaaaatgactcaaccaagtaagatttacaaaamaaacaaaactgttttcatcatctttggttgtagttttataaagaatgctggttcatggactccagacacttcaytgaaactgtgtgaatcattttaaacaggtttgtccttgggccccagatagtacattggcatttgtgaatcattttagatgagtttgtcctcagtacaaatcgtgctgtgtttaaagttcttggagacacttctctcttccaataaaaggcttttactagatgtttcagtgacataaagttgaagacataaatactgttttatattgtaagcaggaccaactcttttatggtgtgttttatacgtctagaggatttttgttgttgttgtttctttgaggttttctctgaaacttcagattaaggtagtccttgaagtggaggctattaagacctagtgttatctgtytcagggaggtgggggactaggtggactgatggaccccagaactccagattccttgcactggaagctggtgttttgtgtttggaagagcctctgccctctgtgtcatgctgcagtaaagtatgggtcaacatccccaaaatgtgtgactcgcccaaattaagtggtgtcatactctgatccttcttccactgaacatcacattcttcatgagaatcacaccattgtcctctgtctgccctgcctgtgagacgggccaygctctatgcttgcccgcctcttccatcaggaacactcacacagtcattctyctcacataccccactctcatctgctgcccctcacacctgcccttctatagaatgttctaccctttaatagggaagggtttcttcttcctatgaatttttacctcactttgtgtctttttaggtttgtattggaactatttgcaaacaggtcttggcttatctaaagaaaaattgtaagctccccatgacgcaagacagtatcttatttacctttgaaaacctcatcacactctgccctgctcagagtacaatctaaataaaagtctattgaatgactgaagtagagtttcttttttaacacttatatgcacattcttgtgacaggcacagtgaaagatttatcaaggaatgacatggtccccacccatgacactgttaaatccataatttgtgatgcattgtttttagttatctagtgctgctgaacaaaccactccaaacttaatgatgtaaaacaacagcaattttatcatgctcacagacattgtgggcaaggaattcgggacagggcacattggggatggctggtctctgctccatgatgcctaggacctcagctgggagagacttgaacagttgggggctggtgaatccatgtctaagcttcttcattcacatgcctgtcaccttggcagcatggcctagaagcctgggcttagctgggcctgagacccccagcattctcttcaaggttggggaattggaccctacatttgatgggagaattagccagttcatgttgcagaagagcatgtggagtcggagatactttacaagcatctatggaaaatacagtctgaagtgaatgcccaaatgagtggcaccaacactgattattactgggtgacagaggcacatggagaaaatgtcatgagggaggaaatgctgggatttgccttgacctctggctgggggacggggagggatgagaggtccaaggcaagatggataagtgggaataagcagccttgttttggggaaaaagagggacagacctagaatggctggctgggtgaaatggcttgttgtgtctcctaaattagattttacatttttgagggcagagctacttaatattgtatttaccccagaggaagattatttttttcattctctaaattgtttaattaaaactcatagttcatgttaaatttgttcaaastttccatctaatggtgaggtggtaaaggaaataaaacttaccaaaatagaagagggagaaatgaaaaggaaatatgatcaatgatttctgttctttttacttcctacttgcaaagactctggaaatgtaatgatggttcagagtgttctgctataaatcctaacagcttaaacaatctcctgggatcatattggcaaactctaagatgatacaagtatagacttagtttgtctgagcccgaggttcagtgtttggagaaaaataatacctatgtcgagataatatcagataacctataaaagcaggtagcccagtcatgcacattggtgatcaatcaatgttagctgaatccaaatattacgagtgcagatgctgaaaggaacaaaaggaaatctcactcagtcatccatctgccagtatttccaccctttcccgcaaagaggagctcagtgtctgtctctgttattgcatcaggatctcacattatccagtaaacccaaatgctgtaggtaagagatgtaataggtggtatttattaagtggttttaataaagttttgtggataggtatgacaccatttcttttgagcttaaagatgcttaaaatagctaaggttaaaaatgagggaagatctgaaaagaaaaacagtaaagagatgtgagatgtaaacactgaaaggaagtaagggtagagcaaaaaaaaagtaaagcatcaggtaaatatttaataaaatgtttatacatgtatattgactgtaggtgtagggttagtctattgaataaagctgcctttcttaggaatggtggtctcaaaatgcaccagtgccttcctattggctgaatgtccacttctgttctatgcactgtgctaaagggtggacatgctgagatgagtgtgagtggcctctgcaccaaagagttcagtctaattctgggggttggggataaatatgttagccagtaaatgccatttattgctttagatgtcatctcagaaggataaggagcagtggggacaggaggagcaagccatctcctgggggagtcaagaaagatgaggacagagagagaatgtcccttggatccaatatggtggccattagtgaccttgttaaaaccagtaggaatggggtggcaagaaggagagtagaacagaytataagaaagaatgagttttgatgaaagtattggaattttgatgaccttttttattacaggtttgggagcaactactttcttcactctctaaactgcaaatcattcagggtaattgtsctggttcagttagcccccaagctgagaagacaggcccactgtggtttgagtaacttggaaatcttgtggggtcagtgttttgactctcttcattttggtcatggttcaggattttcacacaccactaaggtctaggggaagcttctcagctttctggataccctctcagggctcatgaagtggcaggcctgccctgggaaggtcaggattcttctgtaaaagcagagaacactgcatggagcccagagagcccactctctgcgctcttcccttcctatgggctcacacggggaaacagatgctttcctataactctgagcactgaagcagctttgctctgccttggccgaaacatctatccaggaccaaattcttaaaaccccaggggccctggggtgattttcagcccaggccctgaacctgtcataaaatgtaatggatgatatatttttaactgctgagaccagagagttcacataacctatgaagactgaaacaacataatgtttctgcagttttgaagcatttcaaaaaccagaggatggtctctctcattaggcattactagtaagacaaaagttcttaaccatttctgtgcgtggacgcctttggccgttgggaagcgcacgtggatcctttctcagaatatgcttttacatacatagaataaaatacatagaattacaaagaaattcagttatactgaaatggagttatcaaaatttttaaagaccactttatgatataataatataccagctttttcttgatgcatgaaataagaagatctacagacattttgagtactgttaagcataaacaatatttcaaggtgtctacaactataatatagtgtgtaatatctcagatttctatcgacggtagagtyacaggtctttctaatacttttgtggtttgatgcctacattttataatggaaggaaatgctaaatttcagttagaggttaataaaaataaagaaggaaaattcttttcctctatctaaatccacagatgcyctgaattctcttcgaggttaagaacttctggtttaagatatgcttttggttgacagtagtaaaacaagccaaaagaagttgaccatttatgtgatgtgcagtaataaattagcaattcagagttgaggagctcattactaatctgtggatagtcctaatcccagcccttttctttctgagctttgccttttgtaaatctcagtgcttcacacacatcagacaaagatattttgtgagtggctctaaaaatgggggcaaaacatgaccctgaggaggcctggggctgatctgagccttaagacttatttgtggagaccttgtgctgttctttttttttttttttaattatactttaagttttagggtacatgtgcacaacgtgcaggtttgttacatatgtattcatgtgccatgttggtgtgctgcacccattaactcgtcatttatcattaagtatatctcctaatgctatccctcccccagccccccaccccacaacagtccccagtatgtgatgttccccttcctgtgtccatgtgttctcattgttcaattcccacatatgagtgagaacatgcggtgtttggttttttgtccttgcgatagtttgctgagaatgatggttttcagcttcatccatgtccctacaaaggacatgaagtcatcattttttatggctgcatagtattccatggtgtatatgtgtcacattttcttaatccagtctatcattgttggacatttgggttggttccaagtctttgctattgtgaatagtgccacaataaacatacgtgtgcatgtgtctttatagcaacatgatttataatcctttgggtatatacccagtaatgggatggctgggtcaaatggtatttctagttctagatctgtgaggaatcaccacactgacttccacaatggttgaactagtttacaatcccaccaacagtgtaaaagtgttcttatctctccacatcctctccagcacctgttgtttcctgactttttaatgatcaccattctaactggtgtgagatggtatctcattgtggttttgatttgcatttctctgatggccactgatgatgagcattgtttcatgtgtcttttggctgcataaatgtcttcttttgagaagtgtctgttgatatcctttgcccacttgttgatggggttgtttgttttcttcttgtaaatttgtttgagttcattgtagattctggatattagccctttgtcagatgagtagattgcaaaaattttctcccattctgtaggttgcctgttcactctgatggtagtttcttttgctgtgcagaagctctttagttcaattagatcccatttgtcaattttggctgttgttgccattgcttttggtgttttagacatgaagtccttgcccatgcctatgtcctgaatggtgttgcctaggttttcttctagggtttttatggttttaggtctaacatttaagtctttaatccatcttgaattaatttttgtataaggtgtaaggaagggatccagtttcagctttctacatatggctagccagttttcccagcaccatttattaaatagggaatcctttccccattgcttgttttcgtcaggtttgtcaaagatcagatagttgtagatatgcggcattatttctgagggctctgttctgttccattgatctatatctctgtttyggtaccagtaccatgctgttttggttactgtagccttgtagtatagtttgaagtcaggtagcgtgatgcctccggttttgttcttttggcttaggattgacttggcgatgcgggctcttttttggttccatatgaacttgaaagtagttttttccaattctgtgaagaaagtcattggtagcttgatggggatggcattgaatctataaattaccttgggcagtatggccattttcacgatattgattcttcctacccatgagcatggaatgttcttccatttgtttgtatcctcttttatttcattgagcagtggtttgtagttctccttgaggaggtccttcacatcccttgtaagttggattcctaggtattttattctctttgaagcaattgtgaatgggagttcactcatgatttggctctctgtttgtctgttattggtgtataagaatgcttgtgatttttgcacattgattttgcatcctgagactttgctgaagttgcttatcagcttaaggagattttgggctgagatgatggagttttctagatatacaatcatgtcatctgcaaacagggacaatttgacttcctcttttcctaattgaataccctttatttccttctcctgcctgattgccctggccagaacttccaacactatgttgaataggagtggtgggagagggcatccctgtgttgtgccagttttcaaagggaatgcttccagtttttgcccattcagtatgatattggctgtgcgtttgtcatagatagctcttgttattttgagataggtcccatcaatacctaatccattgagagtttttagcatgaagcattgttgaattttgtcaaaggccttttctgcatctattgagataatcatgtggtttttgtcgctggttctgtttatatgctggattatgtttattgatttgcgtatgttgaaccagccttgcatcccagggatgaagcccacttgatcrtggtggataaggcttttgatgtgctgctggattcggtttgccagtattttattgaggatttttacatcgatgttcatcagggatactggtctaaaattctcttttttggttgtgtctctgccaggctttggtatcaggatgatgctggcctcataaaatgaattggggaggattccctctttttctgttgattggaatagtttcagaaggaatggtcccagctcctccttgtacctctggtagaattcggctgtgaatccatctggtcctggatgttgtttggttggtaagctattaattgttgcctcaatttcagagcctgttattggtctattcagagattcaacttcttcctggtttagtcttgggagggtgtatgtgtcgaggaatgtatccatttcttctagattttctagtttatttgcgtagaggtgtttatagtattctctgatggtagtttgtatttctgtgggatcggtggtgatatcccctttatcattttttattgtgtctatttgattcttctctcttttcttcattagtcttgctagcggtctatcaattttgttgatcttttcaaaaaaacagctcctggattcattgatttttttgaagggttttttgtgtytctgtttccttcagttctgctctgatcttggttatttcttgccttctgctagcttttgaatgtgtttgctcttgcttctctagttcttttaattgtgatgttaggttgtcaattttagatctttcctgctttctcttgtgggcatttagtgctgtaaatttccctctacacactgctttgaatgtgtcccagagattctggtatgttgtgtctttgttctcattggtttcaaagaacatctttatttctgccttcattttgttatgtacccagtagtcattcaggagcaggttgttcagtttccatgtagttgagcggttttgagtgaatttcttaatcctgagttctagtttgattgcactgtggtctgagagacagcttgttataatttctgttcttttacatttgctgaggagagctttacttccaactatgtggtcagttttggaacaggtgtggtgtggtgctgaaaagaatgtatattctgttgatttggggtggagagttctgtagatgtctattaggtccacttggtgcagagctgagttcaattcctggatatctttgttaactttctgtctcgttgatctgtctaatgttgacagtggggtgttaaagtctcccattatattgtgtgggagtctgagtctctttgtaggtcactaagggcttgctttatgaatctgggtgctcctgtattgggtgcatatatatttaggatagttagctcttcttgttgaattgatccctttaccattatgtaatggccttctttgtctcttctgatctttgttggtttaaagtctgttttatcagagactaggattgcaacccctgccattttttgttttccgtttgcttggtagatcttcctccatccctttattttgagcctatgtgtgtctctgcacgtgagatgggtctgctgaatacagcacactgatgggtcttgactctttatccaatttgccagtctgtcttttaattggagcatttagcccatttacatttaaggttaatattgttatgtgtgaatttgatcctgtcattakgatgttagctggttattttgctcattagttgatgcagtttcttcctagccttgatggtctttacaatttggcatgtttttgcagtggctggtaatggttgttcctttccatgtttagtgcttccttcaggagctcttttagggcaggcctggtggtgacaaaatctctcagcatttgcttgtctgtaaaggattttatttctccttcacttatgaagcttagtttggctggatatgaaattctgggttgcaaattcttttctttaagaatgttgaatattggcccccactcccatctggcttgtagggtttctgctgagagatccactgttagtctgatgggcttccctttgtgggtaacccgacctttctctctggctgcccttaacattttttccttcatttcagctttggtgaatctgacaattatgtgtcttagagttgctcttctcgaggagtatctttgtggcattctctgtatttcctgaatttgaatgttggcctgccttgctagactggggaagttctcctggataatatcctgcagagtgttttccaacttggttccattttccccgycactttcaggtacaccaatcagacgtagatttggtcttttcacatagtcccatatttcttggaggctttgttcgtttctttttattcttttttctctaaacttctcttcttgcttcatttcattcatttgatcttccttcactgatatcctttcttctagttgatcgaattggctactgaggcttgggcattcgtcacgtagttctcgtgccatggttttcagctccatcaggtcttttaaggacttctctgcattggttattctagttagccattcatctaatttttttcaaggtttttaacttctttgccatgggttcaaacttcctcctttagctcagagtagtttgatcgtctgaagccttcttctctgaactcatcaaagtcattctccatccagctttgttccgttgctggtgaggagctgcgttcctttggaggaggagaggcactctcatttttagagtttccagtttttctgctctgttttttccccatctttgtggttttatgtacctttggtctttgatgatggtgatgtacagatggggttttggtgtggatgtgctttctgtttgttaggtttccttctaacagtcaggaccctcagctgcaggtctgttggagtttgccagaggtccactccagaccctgtttgcctgggtatcagcagcggaggctgcagaacagtggatattggtgaacagcaaatgtagctgcctgatcattcctctggaagttttgtctcagaggagtacctggccgtgtgaggtgtcagtctgcccctactcggggatgcctcccagttaggctactcgggggccagggacccacttgaggaggcagtctgtccattctcagatctcaagctgcctgctgggagaaccactactctcttcaaagctgtcagacagggacatttaagtctgcagaggtttctgctgccttttgtttggctatcccctacccccagaggtggagtctacagaggcaggcagacctccttgagctccrgtaggctccactcagttcgagcttctcagccactttgttaacctactcaagccttggcgatggtgggcgcccctcccccagccttgctgctgccttgcagtttgatctcagactgctgtgctagcaatgagcaaggctccgtgggcgtaggactctccgagctaggcacgggatataatctcctcgtgtgctgtttgctaagactgttggaaaagcgcagtattagggtaggagtgacccgattttccaggtgccatctgtcacccctttctttgactaggaaagggaatgccctgaccccttgtgcttcccaggtgaggtgatgcctcgccctgcttcggctcaygcttggtgtgctgcacccactgtcctgcacccactgtctgacactccccagtgaggtgaacccagtacctcagttggaaatgcagaaatcgcccgtcttctgtgtcactcatgctgggagcagtagactggagctgttcctatttggccgtcttcgctgttatttttaagaataaattttaaaaggacaaagtaaaactccaagttgaacttaatggcaaggaagtgtcaaaatgagactctgcatgtaactccccatgcctctccactactgatatggatctgcctggtccacatcatcctggagtgctagggtgaccctagcactgtatccagctcttctcacctctttaggaattttaagcccacaaattaagtatggaatttattacatggtatcttgsatttcagaagcagaatctgagatggggatttttgccagagatttattgggggagtgctctcagaagtgaggaaaacagaaagggacagagaaaaaaatgttgagtaaggatgtggtctcaggaaaagtctagcctcagcctgatcccgtgcagaagctctggagcagagcttatcccacccagcagcaagggggatggggtgttatcctgctgcatctgccagctagggaatggggcaggtattagttttctaggccacttcaaaaattacaaatttagcagcttaaaacagcataaagttactatctcacagtttttgtcagttaggagtctgagcatggcctgcttagcgtttcacaaggccgtactcaaggtgccagccagatcttttatgcggcttggggtcttgctccaggctctcatggccgttgctggaattcactcctgcagctgtggagcccagggtgacttgcttcttcaagactagcagaagactctttttgctgcttctagtctcttagctcagccttccagtctcttagctcagccttccagtctcttagctcactgctctccaaggattcttgacacttgcactccaacccactctgggtcagaagctattcctccctgtgaaaggggtcacttgagtaggccaattcacgccatcctttctgattcactcaattgagctgattcagaactttaattacatctgcaaactcccctcacctttgccatttaatgtaacatcacaggagtgagaaccatcatatgtccagtccttcctaccctcaaagggagaagattatacaggggcatgggtcactggcatcattttaggattctgcctgtcacagggcgtcacttgcaggcttcgctggaggagatggctcctgtcacccaagggcagttctcctgagaaagttgtgggcataagcaatgcatgtagcggctagggcactgaggtcccgtgacctggttccagcctgctctccttccctgtccatagtccctccctgcccctcccccgtgatcttgccccacagacctttctcaggtggcggtggtgatggtgttgtaggggcaactggcttttttagagtgtcaggagctctccaaggtgcttgacatccatttctctaatcttcacaacaagcatgcaaggttgattctgtcatcccattttacatctgagaaaacaagctcagagagagtaagtaaagtggccaaggttgcagtttgcaagaaatggagcttggaccccctctgaccttgaactggctgacatcaaagttgtcgctttgcctggtcctgtcacctctcttcctcagatgtctagtgtttattagacctccatagtatcttcaccaactgagaaggtgccccatcagcctgaggaactcccagggtcacccctctmcaaggattcttgacacttgcacttctacccactctgggtcagaagctattcttccctcattggattgccaccattcttgtaagggcaccttctctgcaccacagttttttgctcacactcctcctatttttctcttctcagcttccctatgcctcatgatgccaggcataaggcacacagcaaccaagtgttggcagaaggcaaattatatggtttggctgtgtccccacccaaatctcatcttgaattttagctcttataattcccacatgctgtgggagggacctggtgggagataattgaatcatgggggtgattttccccatactgttcttatggtagtgaataagtctcatgagktctgatgcttttataaggggaaactcctttcacttggctctcattctctcttgtctgctgccatgtaagatgtgccttttgccttccaccatggttgtgaggcctccccagccatatggaactgtgagtccattaaacctcttttactttataaattacccagttttgggtatgtctttatcagcagcatgagaacagactaatacaccaattgaggttcctccagagaattaacaaaatgtccakgcactctttcgttgttcccccatacccacagacctgccatccctggccctgcctggatgccggtacctggccactgctgctatattccatgcttttggacaagagcatgttcagtattgtccaggagacccagggagctcaagacagagctgagatccagttcctacagccacagttaacaccccagcccccgacacacacacagacttttcaatgcaaaatcaaaccattcccaaatatccagctacatattgttttacctttgaagagaaaaaagcatcagtggggttatgtgattttcatagatgaacaatttttgcaaatatgttaattgaagagtaattggtgctttyttgaccctcctgagcactgatgcttgccaaagggttatacatttcagactaatgatgatatccattactatatgtgcaattgcttataaactaatatatagtcatattaaaatctctaatctgattgagaarttttcagaaacaaggtacactgattttctyaccacttatttcctgctctcatgacagaatttctggagttctttgaattcacmtggtttttggagctctgtcaagtcaatatttataactgaactagttcaaacagttcaagcattgtctcttcctttctggttgaagttctgtcttagaagactgttgtagtcagctgtgcttgtcataaagttttgtttaaaattattttagaattttcttctttggctttaatttaaatttttgtttgtttacttttttttttttttttccccggctcactgcaagctccacctcccaggttcacaccattctcctgcctcagcctcccaagcagctgggactacaggcgcccgccaccaggcctggctaatttttttgtattttttagtagagacagggtttcaccgtgttagccaggatggtctcgatcttctgacctcatgatccacctgcctcggcctcccaaagtgctgggattagaggtgtgagccaccgtgcccagccttgtttactttttaatttataggattgtaaatgaaactatacttggcctcagtttattctctgggaaataggttcttgctacaggtacagtttataataaggatttatttcataatagggagctttttatagattttaatatcatagttgccatttaaaaaattgtattaaaggccgggcgcagtggcttatatctgcaatcccagcattttgggaggccaaggcgggtagatcacctgagattaggagtttgagatcagcctggccaacatggtgaaaaccccgtctctactaaaaatacaaaaaattagctgggcgtggtggtgtgtgcctgaattcccagctactctggaggctggggcaggagaatcacttgaacctgggaggcagagattgcaatgagctgagattgcgccactgcactgcacagagtgaaactctgtcaaaaaaaaaatgcattaaaaatggtaatgatcaccatttattgcttgcctacagtatgtcagtcattatacaaggtatattttataattataaatattatttattatctgattacaaatatgttataccttgcactgtgtcctgtatgtctgttatgtttatttctgaattttccttcctttttcctctccatgctttgatctggatatttcctattgagagaatacactgaggcccagtgtgatttcattcacaatcctataaattaaaaagcaaacaacttctgggtcactggtcgtcttttctgctgtgttcaatctccagtaaaatatgtcagcaccttaaccactgtcctctgcctggtttcttagtctcacagccccgtgctgctgtagaattggcagatgccttgaggacaattgtggcgtacagtaaacatacctcaatatacttatttctgtttgggattttcgcccctcaagtcctcattgcgttattagccctgagctcttaagttttgtcttcacagagtcataagacttccagaaattcagcttagaaactcaagaacttagctttttagccactgcttcactttcagtttcatagcctctcatcccacactgcttacaaatctggaaacacctcaagggaaaagtgcccataaatgttggggttacctccacattctttccttctctttgggaccctatactctgaagtcctggctgtcttgatagttagttccctgataactttatatatttttaatttttttaaatgaacctggcatttcaaacataagttccatgataattttaaacaggggtgtgtgtgtgtatgtgtgtgtgtgtgtgtctgtgtgtgtgtgtgtgtgtgtgtccagcttttcgagttgtccgtgggaggacggtttcagtaagttactctatcattactggaaatgcaaaatcctgttttcttttaaaagagtcttcaagctgatgaaaattttaaagtagcttataacattttaactgtgatcttatttattatgagtatagagataaaggaaaaggcatcccacttctgaagatttctcgtttctaggagtgtctacaagattatcataggtgaaagtagggttggatgcagagaaatagtaagaaaggatggaggatggaggggataaaaagatcacatgtttggtgaatcctcttttaaaaacacttagaagattttccctaaactaattatctggcttaatgctaactgcttatttgctgaccttctgctttatttacaaatttaaagtggggccaacccttcctgttttcctttaatttaccccggcagctgctggttagctaaggaagaaaaaaaacccttttttttttttttttttttttaatggagacaagcagcaattaggtaggcttctaggtcaggtggccagttaggggtgccagggttcccaggtccagytttcttcgggtcatagagtgagggtgggaatcaagtcactcagatwtttctcccgaattgaaatgcgtgtcttcctttggctgggcagatgaggtcccctcttctccatctctgctgctgggtcctggtgcaagcccttactctctttccactaaacccatgtggcagcctcctccttagcctgtttctccccagtcctgcacccatcagtccactgccacacggcagctacagggacctttctagaacacagcctcctgctgcctccatgttggcctccctgcccctgtcagagggatttttatttattttatttatttatttttgagacagagtcttgctctgtcacccaggctggagtgcagtagtgtgattgcagctcactgcacctccgcctcctgggttcaagcaattctcctgcctcagcctcctgagtagctgggattataggcgtgctccaccacgcccggctaatttttgtatttttagtagagatggggtttcaccacgttggccaggctggtctcaaacttctgacctcaggtcatccgccttcctcagcctcttaaggtgctgggattacagacgtgagccaccatgcccagccaagagggacttttctataacagcctctaggatcatgctacccccttcccagctctccctagcttttaagatcacataacctgcaaagtgccctgagatctggttctgcatgaatcttctctaccctattgctgcctatcaacttgacttcccacctttgggagtcagatgmagtccgctggacagcccatgscctctccatgtggctataccacccctgccttgcccctgctctctgcctgatgtcctactgtcttttgactgtgcccaggggcatttcctctgggaagcctgccagccctcagtctgaacctttgggtccccaaagcctcccctgtcctggtatgtgttgcactgcgttgtcatctcttgtctgtttcccctgagactcattattccctgaaggtctttcatctctgtttccctgtggcccagcacattgcctggcataaagtaagcacccaataaatttcagatggagcatatgttaagttccctataaaacctcagctgctgcaaattctgccaccagcctgggtgttctcctctgtggggactccttcagttttcagagacaggagactcccatagatttttagcaggaaaaggtagattcttgccttttagtctgtcagaatgacactttattagatgctttagaactgcagaagcttcaattttagaattttcagtttgtagcgttattttttttaagcagtaaaatttcagcgactatggtctgtgccagagccctaagcctctttctccatcctaaggagtttctctgcttaattgcagtgctgagctcagggaagctgcatatccaaaaatgaaaaggaaaccgctaaattgtgctgctacttttcctttgcagctcagataaaacaggcccagtgtgggaagaaggggctgtccttttgggggtgttggcctgtttctaattgctgcaccctcctctgcctccacccatgcctcagtgtggtttgggtcccttctgcccagagctactgggacatgtaataagaagctgcttttcagacttcttaattaaaataggttccggcagccattgccaggaagcagcattcgcacccctacatgtccaaatgcattactcatccaaaataagatatgccacgactcaggtttccctcctyagccaccatggcttgaatggctgcatttagaaacagcccttacttcaagcccctatttcttaattatttgtcacttattcscattcatccttgtgtgtgaaacatttttcccctcaccctatatgctgttatgtaaacaagtaattttttaggatgatgtcagaacctgatgtagttggggtggttttaaaatagtattttatggacagcaagaaaagtagttttgcttctggtttcacttgctagctttgggatggagggacatttatttgagcttctgcacctctgtgatcttgtctataaaacggggggcaatggctggtgctgtggctcacacttttaatcccagcactttgggaagatgaggcagaagaatcacttgaggccaggagttcaagaccaccttgggcaacatagtgagaccccatctctacaaaataaaaaataaataaaagaaataaaagaatgaaagttagctaggcatggtagtatccaactgtagtcccagctactcaggaggctgaggcaggaagattgcttgagcttaagagttcaaggctgcagtgagctatgattgtcccacttctgggaaacagagcaagactctgtctcaaaaaaaaagtggaaggtgggggtcaataatctgccagctcaggtattgtaaggattaagaaagacagtgtctgtgaagagcttggcccagtctctggaacacatttggtagccaggaaatagtaaatgacttctgtttccctacccccatcttcacctcctcccctagaataacaacatcataactgacttatttcatcattaaggatttaaatgcaaaaccttaagatagtcagccttagggaaacactgaagaatttatttttaaacacataaagattgcattcattcatccttctccacaccgcgggcagtcttcaaattctggttagcagagtcagcgggcagggaggatctggatcctggggttgtgtgctttgctcccagaggacatgagtatcaaaggtctgccccgatatctggagttcaagaggcgttttctggaaacaatttgtccaaaggctcccctatcactctcttggagaagtcctgtgttttatttatgctgaatgattgaatctattcccagccgaatgttttcctgaacaccagtaaaaatcatctgccagtcactcgggctcccaccccgggagtcatctgtcccctttgcctggtctcccatgcctcacagctcagcagccacaggcatggccatatctgcctctcttgcccttgccactccacttcatcatggccgtctcctctctggggctgctgcgggagatttccagtctgccctccagtgtctctgcatgcattctactcacctcctctccccccgcagccccgaggaactctgaagaaacacaagcttctgtggccccgtacacgtaggactaccaccgcttacttggaggcagtggcagtaaaaacggaaacaacaaacaaaacagaataaaatcctctttaactttgtttaacttggtgtcccatgcagtctatttaatttcagactcttatttaccccagtcctagggaactgaggttcataggaccaatctgggtgaatgctgctacagtttgtggatgggctgctccccatttgcttgttcaggtagctttgagcccaaacattggtcagcaagggcatccatatagtgacatgctgtatgtcatcaaaaagaaggtgttcctgacatagacaatttccagaatatatgctaagtgactaaagcaaagtgcagcatgagatgccaccatgtgctgcagatgcttggactggatggatacctaagtacccccaaactggcaggcacatctgcctctggggaagggggctgggtgtcggggaggggtgggagcaaattcctccccgtgtgcctcctggggcctttagaacctctacttctttgaacacagtgctactctgctccaaacgcccccaaacttcacacagagagtagtatgaagtcctcatctctgcacttgtggccctgaggttggcctcagcctgcccgcccagcttctcttctcattcttccctgctgccactctcctgtctccccagggactcggctgtttgagccactttcctttgacacgtctcagacttgccctgctccacttggaagtccttggagcagcccacacgcacccccgccgagctcactgtctcagaatgtgggaccacctaccagctttactcctgcgtctaactctaacttgtgagattgtgggggccagagtccccaggaggcagtgacgctgtgtgcagaaaagccaagagctccagggctgaacagatgtgactgaaaatctttaccagccatgtgccctggggaactgagcctttcatttcccctttccttttctgtatawtggaggataacaagccttcactcacagggcgtgggtgtgtttctcatctccttgcagcacctagcacagtacctggcatctcatatgttcagggcatgtttgctctcctcccttcctttcccatcgtgactgtcaatcgactgttcccttggggcttgagattcttggattccaaaggaaagaacacagggccaggagtcagaatttcatccttgcctccgctgatgtctaattctgggataacgctgggccactcagtctttggattccctgccctaacacaaaatccatatttatctcaatgcaaaagagatgtggtcatcgaaacactgaatgcaaagggttagcagagtgagcacagatgttctcccatttgccaactggtttctaagaatatttggaggatgagtaaagtaatgtcttccatatgctcaagagaagatgatttagcaccatgcaaggtagagaaggagagcccccacccatcaacagaatgaccttggacaagacactagctgccctaggcctcaattacctcatttaaaatatgaaagtcataaaaccctacctcacgagggtgattgtgaggattatatgaggcaattcatgtagaaggtctttgtaaactgtgaaatgctctacgactgtcagccaggattagtagttaatgcacgtatttgtttattgtttcagcrgagggtgcaggacgtcatcagcccgatcgtgtttgaagcagcctacagcctcagtgagcatgtgactggagaggaggagagggaactgccgcctctgacaccagttctccgctggaaaaagggacaaaagattgcccaaaagaatcaggtcagaaccttaaagctcatactcagcacccaaggtggcagctgcacasagcagaaataatggcccaaaagttgagagagccgtgggyctggctgctcaggagaccgcagccaggacacacctcctctctgggtctcccttttctgatctgcaaaatgataaaataaacagtcttaggggttacttgtgactactgtgggacttaaacactttcagacaattctcaggctgttagaagttacaatcccctcgagttcgtgaactggctggccacttggtccctgaacttgcctctgttcctagactgttttcagagcttagattggtggatagtaggtgcttaatgaatgttttattggtgggagaatgagtgaggtgaagaagcaagaatggtagcttgctgaattggcagttgagttacagaatgctcaacccaagagtccctggaaaccagagcactggggcaagtacaggtggtccacactcatcagattctgggatgtgcggctgtgtagagaagctttagtgcgatgggtgtatcactcgtatgargtaggagtgagcctgtgcctgattttgtgcagcagcgctggccagctctgaggcgtgcagcactgagtgcggtgcaggaatatgcaaggaatctgcaatcccaagtctgtttcaaatcttttcttgaaacccaagatcaccacagattcagaaccctgtggaagatcaggaaaaactgtgggctaacccagcctcctaggcagggttggggcaaagctgtggaaccacctttcacagtgcttcagaccactgtaagtgtaggggaaaactagcagattgtgacccatgccttgtagattagagttgtagactgaaccacagagaagggtttgggatttgagatatccatccaggtgttcacgtaagtgctgagatttttaccaaggcatcgcattatctcccaaagcctctttcccatcatcctaagtggggttcyctagaagcagagcctgagaaagggaattgggaacacatggtctaatgatgctgtgctcttagggaaaacctgtaaaggaaaggcatgggggctcaaaatggttgtggtctcagataaagtctggctgagggactctggaacaaaaattacaccaaagagttgtcctcaccttgaggcaagaggggcttcccttttgtgccccatatcattcagccattgactggctgtkggggggaagggaagtgtaaccctccttgaaaggagatcccctcagctgaggatggttctctagagaagaatgcagatgtgagccataagcagcctacacacacatcagccaggagatgggccacagttcacwgtgcccactacacatcaaaacacaccctctgggraatgctgccaagaggttttgatttaaaacacgaaccttctttcacaacacaagtgccccaggagagtggcctgtaagtcccactggccattgatacttggaacaggccctgggggagtgagggaggacacgtggtgtctaagcaggtgggcagagtagatgggctggccttactctgaggtgtggagaaggctagagaagagtagaagataaggtgaagaggcagggcaggaagctgatggcttctgccttgactgggaagtacagacctrggtcccctcctgacagggaagtggggagaagaggttggcctggggacacagtaaagcatggtattatggtaacttctacataattggtctctagttctagaattattctgctttctaaggtcaaatcttactggactgataaacttacccatacttgggttacggaagttacccagactcggggtcctgggaagaatttcagggtcctctgtgcttatttgtttctgaattgacccagtgaggtagtcatctaccctgtccagcatcttgctagcctggacatactttccacagtkaacctatctctcattcctgcaagtctgtcagtggcacagatgtggactttctttagtgaaaagcatcttggaacctttactgacatttttagatttaagcagcccaatcaaagccagagatggagggacagattagtattgaaatgatgttcttggtcacttctggttccagatggccaaccaagcacaaatgttgatgtctgtgcctyggtaccccattgcaatgattataaatgagtagatcggaacagggaggacaacactgtgaaagaaagggcatcagctaataataagagtccagtaattttctggtatgagtgaagtaaatggaagagtgttagtgggtgaacttgaactgtacatggaagagctggcttcctgcctacccagggaacagagaagctgcagccacagccaggccaacagttacagagggggccagagtaagaagtgggactgcaagtggtggtggtattgagggaggtcagtgaaatgtgaaggttggtatgaagaagggttagagttgacttttcaccattgtccccacccctacaggcttcaggcatgcagaatagcaagcagccaggcatcgccttctctaaagtgttaartaaactgtttaagatagtgtgggcgrcctcgttctcagagaaaagaaagccttacttctggcatttgaagtcaccaacgtaagagctagctttctctcccacaatccacccaaacactttcacagattttctactcagtccttttaccttagtttgaaatatgaatggacaaccaaggaaacccaagattgaggaatatttggtgcatgaaaggaaaggctaaaataaaccaggagaataactaacttaaaaggaaacaaatgatttagggaatataagagattattttaaaaaattttaaaaatgcaacaccttaatgtctatgcagtagacccaaggagatttaggaatatattccattcttttcattttctaatggatgggattctgttcctttttaaagggaggaatgaaaggcaagggaagtgttcttaaaaattaaaaatatatttgcagcaccaaaaactcagtggaagtattagaagacaatggtaaataatttcccaatggaagtgctaaaagacaagtagaaaagaaagctaaagaataaatttacggggtcctatatctccaagtaataagaatactagaaagtaagaataccagtaataagaaaagagaaagaagggggagaaaattatgtaataatagaatagcatgtttcagagttaaagagggagactattttttaaaattggtgtaaacaacaatttacaatcamaataaaccaaaattatcatagacacatcattttgaaatgtcagtgcttcaaagacaaagggaaaattctaaatgtttcgagggcaaagaatgcaggaatgttgatcatggaggataagtcagcttacaacagaatgagagtcagactgagtagtccattagactttttataagcaagattagaaactaaactatgatgaaataaaggcttcaatgttctgagggaaaatgattttgaaattagaattttgttttcagccacacaatcaaagtatgtggtaaaaataaagtcacttttcagataagcaagaacccagaaagtttacctccctagtaactcttccaaggaaattatcttgtacttcaacaaaacaaaaatgacaaccagaaggagcaagatgtgggatacaagaaactctggaactaactctcaaaagtctaatgacaagaaatcccaggatgataactgcagcaagtctaaaaagcagccaagtctattgagaagaggagatcaattaacttccagaagaatgaagctaagcaatagaatgatgagcaagtggcaaatattcagtatatagtgcagattgaatatgtttcttttatgggtaagaaaaaaataaaagcattcaagacctctcagaaaaatagaaataagataattacctgtacagattctccttgactcacgatggggttatgtcccaataaacccatcatgaattaaaaatattgtcagttgaaaatgtatttaatacacctaacctgctgaatatcattgcctagcctaccttaaatgtgttcagaacacttacattagcctacagttgggcaaaagtcatctaacacaaagcttattttacaataaagtgttgaatatctcatgtaatgtattgaacactatactgaaaatgaaaaacaaaatggttktatgggtactcaccattaacacacacagctgaaagcacactggacctaaagaatatttgaactaaaattaactgctggattatggggctactagtgtaacagggtcatccatttctctctcttctgatgagtctcaagaatagctggtagaagccactgcggtattaacactcgttgatggcttagcaggcatggtgttctgtagaaagctatcagttgtttaccctcctaatcctatarctgactgggacctgcagctcactcccactgcccagcatcacaggaagtattgtaccacatattgctaccctgggaaaagcttttgaaataaaaaatttgaaatatggtttctactgaatgcatactaccttcacaccattgtgaagtcaaaaaatcgtaggttgaaccattataagttggagaccgtctctatgtcatggttaaaatataaaacaaattaaaatgtgataaaataaccagttataactatcagatgttttttgtaagcctcatggtaaccacaaggcaaaaacctatagtaatacaaaaataaaaataaaaaagcaaagaaccaaaccataccactagagaaaatcacttgaccacaaaggaagatagcaagaaaggaagaaaggaacaaaggatctacaaaacaactagaaaacaacaaaattgcagtagtaagtccttacttatcaataattatcttaaatgtaaatggattaaactctccaatcaaaagacatggagtggttaaatggatttaaaaaaaaaaaaacaaaaaacaagacctaactatatgctgcttataagagactcacttcacctgtaaggacacacataaaatgaaagcaaagggatgaaaaaaattctatgcaaatggaaaccaacacagagcaggagtagactttaagtcaaaaatagactttaagtcaaaaactgtaaaaacagacgaagatcattatacaatgataaagggatcagttcagcaagaggacataacaattgtaaatatatatgcacccaacaccagagaaactaaatatataaagcaaatattaatagatcttatgagagagwtagattgcagtacattaatattagggaatttcagtaccccactttctgcaatggacagatcatccagacagaaaatcaataaggaaacatcagacttaaactacactctagaataaatacgtctaacagacatatacacaacagtccatccaacagcgacagaatacacattcttctcaactgcacatggaacactctccaggatggatcacatagtaggccacaaaataaatcttaataaatttagccttgaaatatcaagtatcttttctgaccacaatggtataaaacttgaaataattaacaggaggaacttcagaaaattcacaaatacgtggaaattaaataacatggtcctgaatgaccattgggttaatgaaataattcaaagggaaatttaagaatttcttaagacaaatgaaaatggaaacacagcatacaaaaacttaaaatgtggtaggattttgagtaagtagaagagtataaagaagaatgttgatcctagaaatattctatctgaagtagaagttgaatattcctggactttaactttgcaactgtagaggaggatgtataatcatgacacttgtcttggctcaactgtgagcaataatcatgaaccataataaaattagcactatttattggttttcaatatttataattaagccaaaatcagagctatggtgatagcataaaatgcaaatgtcattaaacttgattatataaaggtaaaagtagaataagataagttttcttaatatcttaatcttttaaattgatgagtcaagagattgcaaaacttgatgaaacaggaaatcactgttggcttaaaattgcagaggtcatcagtagagcaacacttcctaaagtgtgattcctgaaccagcagcatcaacctctcttgggattttgtgagaaatgaaaattgtttttattttattttattttattttatttttttcctaaatttcttatttccttctctttttttaaagttttattattattatactttaagttttagggtacatgtgcacaacgtgcaggtttgttacatatgtatacatgtgccatgttggtgtgctgcacccattaactagtcatttagcattaggtatatctcctaatgctatcccacccccctcccccaaccccacaaccgtccccggtgtgtgatgttccccttcctgtgtccatgtgttctcattgttcaattcccacctatgagtgagaacatgcrgtgtttggtttttttgtccttgcgatagtttgctgagaatgatggtttccagtttcatccatgtccctacaaaggacacgaagtcatcattttttatggctgcatagtattccatggtgtatatgtgccacattttcttaatccagtctatcgttgttggacatttaggttggttccaagtctttgctattgtgaatagtgctgctataaacatacatgtgcatgtgtctttatagcagcatgatttataatcctttgggtatatacccagtaatgggatggctgggtcaaatggcatttctggttctagatccctgaggaatcgccatattgacttccacaatggttgaactagttgacagtcccaccaacagtgtaaaagtgttcctatttctccacatcctctccagcacctgttgtttcctgactttttaatgatcaccattctaactggtgtgagatggtatctcattgtggttttgatttgcatttctctgatggccactgatgatgagcatttcttcatgtgttttttggctgcataaatgtcttcttttgagaaatgtctgttcatatccctcacccactttttgatggggttgtttgtttttttcttgtaaatttgtttgagttcattgtagattctggatattagccctttgtcagatgagtaggttgcagaaattttctcccattctgtaggttgcctgttcactctgatggtagtttcttttgctgtgcagaagctctttagtttaattagatcccatttatcaattttggcttatgttgccattgcttttggtgatttagacatgaagtccttgcccatgcctatgtcctgaatggtattgcctaggttttcttctagggtttttatggttttaggtctaacatttaagtctttaatccatcttgaattaatttttgtataaggtgtaaggaagggatccagtttcagctttctacatatggctagccagttttcccagcaccatttattaaatagggaatcctttccccattgcttgtttttgtcaggtttgtcaaagatcagatagttgtagatatgcggcgttatttctgagggctctgttctgttccattggtctatatctctgttttggtaccagtaccatgctgttttggttactgtagccttgtagtataatttaaagtcaggtagcgtgacgcctccagctttgttcttttggcttaggattgacttggcgatgcgggctcttttttggttccatatgaacttgaaagtagttttttccaattctgtgaagaaagtcattggtagcttgatggggatggcattgaatctataaattaccttgggcagtatggccattttcacgatattgattcttcctacctacgagcatggaatgttcttccgtttgtttgtatcctcttttatttcattgagcagtggtttgtagttctccttgaggaggtccttcacatcccttgtaagttggattcctaggtattttattctctttgaagcaattgtgaatgggagttcactcatgatttggctctctgtttgtctgttattggtgtataagaatgcttgtgatttttgtacattgattttgtatcctgagagtttgctgaagttgcttatcagcttgaggagatatggggctgagacgaaggggttttctacatatacaatcatgtcatctgcaaagagggacaatttgagaaaattcttgggcccaccccagacccactgaatcagaagctgatggggtgggccccagcaaactatgtttttgtttttgtttttgtttttgtttttgtgttttgagacaaagaatcctctgtcacacaggctggagtgcagtgacaggaactcggcccactgtaacctccacctcccaggttcaagtgattctcctgcctcagcctcctgagtagctaggattacaggtgcacgccactatgcctggccaatttttgtatgtttagtagagacaagttttcactatgttggccaggctggtcttgaactcctgacctcaggtgatctgtccgccttgacctcccaaagtgttgggattacaggtgtgagccaccgtgcccggccagcaatccgtgttttaacaagatggctgggtgattctcatgcagctaaagtatgagaactgatacagtagaggagttaaactaataatttgcccatcaaaattatggaggtgaaggagtggggatcgttatgtgagataaattcctgtctatcatggaaggaatttagtaaaataatgtctagatctgataaatcaacgagtagtagtatcagcatgttttctagagatatggaaataatcatcaaaagaaacataaacggacgtgggtaataatgagtaataatggttgcccctggagaggaggactcagtatggcgaggtatgtggcagggggttattatttttctaaccatgtgattctttggttgaaattaaaataaaagaaaaaattgttcttagattgggaagattgtccaggagcctgagagaagttctgggagagcagttctttcttattgtccttttcctgattatggggaaaaaaaaaaaaaaaaaaaagataatcttccagatgttggctcagtttgaggaggaggaaagattctgagagtgaggcccactgcaggaagcagagctgatctttaacctgtgtatatatacacaacagtttgacacagagcatctcacctctttcataggaaggaataaattcatcagaactctctaggtcatgttgccagataacattagggttccactactttaaatgccttgatctcttcactgagcccatgttggtacccaggactatacagaagggtggatcaaatcatgatgaccttttagagttggggtctgcccccactgatggcctaattaaagtggaatcgctgcacagactgtgtgtgtaacatggagatagtgaccagtacatgttaagtacaggcttactgattaatctgaggctttttgctatgagttaggaatgtgcaggacaggcaggagaccaagccttccctctatagggtacatagtcctgggagaagacgggttccaggatagggctttggcactaggctctggtgagtgaatagtgggattgctgctaatgctgagattggattgggattctgggcgctctggggacggtggagcttgaatgctacaagcctccgtacatacagcctgatgggcacacattgcaccttcaaaatttaaggaaagcaaagacctgcatctgtctcatcagaaagggaggcatatttgatagcaggaaaaagacaacctttttttcattaaccagaggagtattttaaaagactataaagctggaagcaattcaattgtgtgtctactttatgtaagacctcgatgaaaaaataaatcattgctgccttcattggagtcacagacagtccaggaataatttacaaagtgagatttagattagtgtgtaagaatttcactgcagaggccacttctggctgaggagaagatgttctatggagaaarggagaattggccagagccttaaaggtggagtaggatttgggtcctcagggaatggaggggctgatggatgctaaaggtctctcacgtggctgaatatctagtgagggaaaggggagaggccatctggactggagattcagtcatgcagtctgaagccacttgttcactggctgaggagttggatgtgattctacggtggacagaccatggcatattttgcagtttggggagatcgtagatgtgcctcagggagattggtgtgcctgggtatggggaggccagttaagaaagagcttgttgcaggggcctttgcaggtgagtccctggggagtctgtgtgataccccccagagagttgactcctaattaattgctagttggtctcagctgctgaaacagagggtatggaactaaatgaaacaatcatgggaagtcctggctggtctgtgtgctgggaagggagcaatgctgtccttggactggtcacctgaaggtcctttatccctcctcctcagctgagcataccaatggtgatgacagaggccctgtcttcaatccctgtacacagaatagcgctctgaaaattataactcttctcasgcttcatcagcaggcccccaaagagacctggctacagcagggcttccaggtctttcactgcggtaggcagaatggccccccaaagatgtccatgccctaatttctggagcctgtgatttggatacgttacatggcaaaagggactttgcagttgtaattaaggtgatggacttccaaatggggagaggagcctggattttccaggtgggtccaatctagtcacacgagcccttaatagcagcaaacttcctccagctggaggtgggaggaatgaggcggaataggaggtcagagagacttgaagcatgcctttgctgatgttgaagatggagtatgtgatgtgacgagaatgtggacaaccttaaggggctgggagaggcttccaggtgactgtctgcaaggaaacggggcctcagtcctacaaccacacagaaccaggtgcttccaaaaacccgaacaaagctggaagtggattctcccccagggcctctagataatcgtccagaccagctgacaccttgatttcggcctgtagaacctggagcagacccagacaacccaccgacctctgacttacagaactgtgagataatagatttgtgttattttgagcagctgaactccggtaacttattactgcagcaatagaaaataatagacacacaatacagcccacacctccagaaccccggggcttctttcctccctgggctctctggggaaggagcacaggctgtgcagtgagatcagggccctggcccagagcactcaccctttagagcctgtttcctcacctgtcactgggggtgccatcggctgctctgcctgcctctgggtggtggtgggattacatgagggaaatgtgagaagcccggaaatgatgaggcagcactggatcctgctgttcccttcctgggaagccggcttcctggtgttgtgaggagaggatgaggccgtcatgggagcaggtctgacctgggctctgaggaagcaggtgctctgctgcctttccacatcctttcctctgaggggggtcccgtctctgcaggcccgtgggtgggctccccggtgggacgcaatggcaccatcttaggcaggagtccccaactcctggatcagtaccagtccggccacacagcatgaggtgggcagcgggccagcgagtgttaccgcctgagcgcccctcctgtcagatgagcagaggcattagattctcacaggaacatgaaccctacacatgtgagggatctagattgtgccgaaaccatcccgccccctccaccgyccgttcatggaaaaattatctttcacaaaactggtccctggtgccataaaggttggagaacactggtctaagggttctggcaggctctcagatgaacctctctggatctttagggtgtctggccctcacgtgtcaggcccaaagatgcctgttagtctgtcgcagagggagaagatctggggaggacccatataaccagaactcgggagccagccgcaccaccatgagcccagatagcatgagtcccttctcttttctccatctctgctgccattccctaggccaggccaccatcatttgtcacctagaccaggtcacatccctgcataacctcctcccgctgaggagctcccttccccctcagaagaaaatccggacacatgctaaggcccacgagagcctgtacagtggggctcctgcctcgccagcgccacccgcatactgcattcccaccaccctcaaacttaccaggcctctgcctgcctcaggccctttgcatatgctgatacctcatctagaaagcactttgccatgcttttcccgtggccagctcttcattttttaggtctcagcctaaatgttgcctcctcaaagaaccattctcccactaccctgtatttcctgactcagctgcctttctttgttttgacacagggtctcattctgtcacttaggctggagtgcagtggtgtgatcatggctcactgcagcctcgactttccaggctcaagtgatcctcccacctcagcctcccaagtagctgggaccactggtgtgtgccaccacgcctggctatttaaaaaaaaaaatttttttttctggacacagggtttccccatgttgcccaggctggtcttgaactcctaggctcaaggaatcctcctgcctcagcctccctaagtgctgggattacaggcatgrrccaccgtgcrtggccttagctgcctatttgattccttcgtgacatctaacagaacgtgttatttcgtctacttgttattgtatttacctctctagaatggaagcccagtgagggaagggatctattttatcttatttgctattgatccgcaacacctggcagagaacctggcctatagtggatgcttagtaaatagtaaatagttgaaagagcccttctggaagaacacaaggctagttcctttggcaaaaattgggcatcatatcagagcttcttcactagcagattcagcagagctataaaattaaaagaaatgtgttctgtaatccctctgggaattccccacgggcaagagagcatgatgtgtgatttgcagtgacatatctataccacggtatgtttgtagtgactacttttcaaaagacaagatggaggatatacagctggtgaaagaaaaggtgtcggctttgttgagaagtcttactttgttgtctttcaagtgaaaagtgagctattttagtctaatggtaatttttaactatgttgaagccatacactttgggtctccattgtgctggaaatcgtcactacagctcctcccaccccacacccctcaatgcatgcatataggaatatagctcatgctatggaaatccactgtttgcacagcctggacattaggtaatagtttcccggctgaggtgcccagctggcttaacatgccattatttacagctctaaggtttattttcattattatatttaaacgtctctgcagaaggaatggaaggctaagagggtgggagagtagaagaggagagggagaagagtcactccagacgtcagaaccagacaggctcctgagaccgtgcaaactgggggatttcagattgcacacttggagtcagggcagcagtttggctcagcaggaggggaaaggggtgttagaggaaaaggctcctgccctccaatgttgtttgacccagatcaaccctactcttatgggtatcagcttctgggtaaatactcttttcaaagagggcaccatggcagaacacatgtgaaaaccatctagtttgaagtatgtgtgagaaaaacaactaattcacccttctcactgaccagtggagaagtctggccttatctgtctgtctcaggcttcttctccaaggttaaccccaacgggaaaggagaggggactcatcaaaggttagaccatgtcctgaagtgacctgttgaatttgcaaaacttctttttcagtgttatgttttatttttgcaatttttgtggggggaaaatgcattctaggcttctgaaaccctttttagaagaaaatcatggtttcctcaaactcttcaagcttattgagttttcttctgtattatcctgtcctattgaaaaccttgtgcaaaagtatgtgtggggtgagaggtgtttaaacacacccggtggacagtgtctggctggggaggaaacgttagcctctcttttcttatcttatgagataatttaggaaatcaagtacaaggcccttgctgtgtgcacttatacctggagccttatttaggggatgttcttgcagatagatggggagaagtcttgctgggatcctctctggttttaaggcattttttttctcactcccagttgcctgcccatgtctggtttagcagcttttagaaacgtggctggcatccttttttcttttctctgacagcaccagcccctttatttgaacttcctagctgttttctgcctcttctgactaattaacagcaactaaaaaagaaaaatgaaacatagaacacaaaaaattccagggtgaaaaaggagaatttctagtcctggggtgcaaaagtccctagaagagagttttgagctgaaatgaaaagttgtgattatagagagacatgaaatgtgtcccataaaaggccacctagtcccaggcagatccaggaagagcactgggctgggagtcccatggggccagggcctcaccaagcagtcagccctgctcagttatcacaggggttgaactggattgcctaaatgatgcctttagatggatggaactggagtccattatcttaagtgaaacaactcagacacagaaagacaaataccacatgttctcgtttataagtgggagctaaataatgtgtccacatagaagcagattgtgggatgatggacaatggaggggtggggaagttggagctgggtggatgatgggaggttgcttgttgggtgcaatgtgcattggcccagtgatggatgcaccaaaggccctgactttgccatgacagaatatatcaatgtggcaaaactgcacttgtatcccatgaatatataccatgtttttaaaaatgttgcctttgggcagaggggataattctgcaaactgcagagccrtggagtaaaaaaaacacccaagatagcagaacttgtcatttctagtttttccacaggaccataaagcaaaattggtgccgggtttgtatttaaagggaaaccaagagggtttttttatccttccatggtttcaaaatctggaaggacaatttgtacagaccctgagatagaaggattcctcagctttaatttcatgawcgatttgcctttcattgattcttgaggatatgaatgttttagaaagcaacagtgtatgccttgattttaagaggcaatgagccttttccttccttcgtttaggcatggggctgaatggagctgaaattcctgcactcttataacgtgccacatgaagggcagttttggattctgggaaaacagcccattgaaacagaattgggagggagaaacctcttacactcaggtcatggtatttatatgaatacaaaaaaaaatttaaatactgtgctaggtgctgggggttataaacatgaattacatgattagggcctctggaaacttgtgtggggctatagaaggaacaccagttcagaaatgtcactcctgtcatccagacaggatgcttcaccataggggcagagaccttctgctaagtcataccgcatatcaagaaatatattgctaggccaggcacggtggctcacgcgtgtaatcccagcagtttgggaggctgagacgggcagatcacttgagatcaggaattagagaccagcctggcaacatggggaaaccccatctctactaaaaacacaaaaattagcggggcatggtggtacgtgcctgtaatcctagctactcaggaggctgaggcacgagacttgaacccaggaggtagaggttgcagttagccaagatcgtgccactgcactccagcttgggcgacagaacaagactcatctcaaaaaaaaaatgcattgatcaaatcagcttaaaaatagccttcttgtttgctcttcttggtgtgggattattcagtccaattcttctactttttttaggcctcagcatgggatttggttgtcatatcaaccctataaacagtgttgaatccatgtcaataattgtattttttaaaagcaaatatcaccaagtccaagaaactgatcctcctctgaacatgatagctggactaggctaagaatcctatttcctgttagatcagaagtgaagattttctggtacagatttgggtgggagaaatgagctacccttcccaaggccttagcacctagatgacatcctctctgaagtcaccctcagccaggagcggacactgagctgctatttctgaatcacatgtccccaaagctgccctggccttggtgaccatggcactgtaagagaagcacagccagccccagcgtccttactctgactcagaggaaaatgcaacttgagctggattcattgaawtcttttttttcctggcctgaaggaaatgaagaaacatagccaaatattctaaaacaggattcaacaaacagcccataggccaaatccaccactgcctgtttttgtaaataaagttttattggaacacatctatgcccattcccttatgtattatctatggctgcttttgctctacaacagcagagttgagtagtgtgactgagaccrtatagcctacaagcccaaaacatatactgtctcacccttttcagaaaaagttgccagccttgttctaaaagaagtagagtaaggatttagtgagaagctggagaaaatattttcaaagacaactgtattctccagggaaacctgagatgaagaccaaggtgaggaagragccagcagagaaatygagtccatgaggctgaggaggccactggatgtccagtcttcagctctctgaagcctgagacaggaaacagttgtctcccgagagaaaggtttgaacctcctttaactagggaggaataagagatgatggcttcttagatctgtttacatttgctggaaaaacttcttccagggaaataactagacagggctttgrccaactagcaggtgaagtctggagggaggtggaagagactgcttccaagctgggttccgatttgtctgattgaagcagccaagcttgtgtttgccagaggacttaggaggatgtggataaaatcaggctgaggcctttttttaaaggcccaagctggagctattgggattgttccctcagaggaaaatcaggagtttgggccattggcttcatggagaacctgtactttgtaccaaggagaagtcatttctacttggtttttgaaactgcattgtcatctagtattccaaggctttagtctgtccaccctcctgctccagagagatgcctttcagttccttaggaaacaaattggccatttgcccaaagagactaatccaggactagaacacaggcactgagtttcaacctcaggctccccagtgcgtgactcaggtctcttgattccatggtgtattgtttttttacctattaaacaattgcattcctagcctatggaaggtcttacctaagccaagactttggcagggattggattgtgcagcccatttttgttaatagcattgcccaagttagggaaggccattaggttggctgagtattctggtattctattgctgcataacaaactctgaaatttagtagcttaaaataacatttattttgttcatgaatttgatttcattgttttttaatgtatgtaaggtatataaaatgatgttttgatgtacatttacatagtgaaatggctactatggtcaagcaaatgaacatatccattgcctaacatagkttttttttttttttgatagtaagagcacttggaatctactttattgtcaaatttccagtatataatacaatattgtcaacatagtcatcacgctatacattcaatctctaaattttttcatgctacctaaccaaaactttgtacctttgaccaacatctccccattccctactccctaccccctccccgacccctggtaactatcagagtttcactttctggttctgtgtatttaacttgtttagattccgcaataagtgagatcatacaatatttttctttctttttgtgacttgtttcacttagcataatgtcctccagtttcatccatgttatcaaaaatggcaggatctcctttttaaaggctgaataatattccattgtatgtttatatatgtgtatatatatatatgtgtgtgtgtgtagtatatatacatatatacacaccacaatttctttatccattcacctgttgacaaacacttaggttgattccatgtcttagctgttgtgaataatgctgcaatgaacatggaaatgcaaatatttctatgaggtactgatttcattctctttgagtatatacccagaagaggaattgcagggtcatatagtagttctatttttattttttttgaggaacctccatacttttttcataatggctgtaccaatttacattcctaccaacaatgtataagggttcccttttctccatgccctcactaacactttttatctcttgtcgtttttatagtagccatcctaactgttgtgaggtgatatttcattgtgacttcgatttgaatttccctgatgattagtgatgtggatatttcagcagaaaccttgcaggtcagaagagagtggggtgatatattcaaagtattgatggaaacagtgcctcatacctgtaatcacaacactttgggaggctgaagcaggaagatcacttgagcctaggagtttgagactagcctgggcaacataatgagaccttgtctttacaaaaaataaacagaaaattatccaggcatggtggcatgtggctgtagttccagctacttgggaggctgaggtaggaggatcgcttgagcccaggaggtagaggctgcagtgagccaagatgatgccactgcactgcagcctgggtgacagagtgagaccctgtctctaataaattaataaaataaaatttaaaaaccctactagccaacaatactatacccagtaaacctgtgcttctcaagttgaaatgaaaggacactaaatagcacaagagagcataataaagaaggaaactcgttggtaaaggtaagtatatggacaaaatcagaacactatattactataaaggtgatgagtaaatagcttttatgtctatgaagaaagttaaaagacaaaagtattttaaaaaccattataagtattaactaaattatgttaatgggtacataatataaatagatataaactgaggcatcaatagcatgtaacttggggggagcagagggaaaatcagagtttttatgcaagtaaagttacattgtgaacttataacagactgttacaaattatttcgtgtaagctcctggtaaccaccaagaaaatacctatggaagttatatatataaaaaaagaaaggaatcaaaacctatcgatacaaaaaaaaaaaagaaacaaaacaaaagaaaaccgcaagggagaaaaagagggacaaaagaacaagacacatagaaaatagtcaccaaaatggcaatagtaaatctgtctctatatttactttaaatgtaaaaagactaamcttcccaataaaaagatacagcatgactgaatagattattaaaaaaaacaacaacaaccaggatcaaactgtatgctgtctacaagaagctcacttttagattcaaggacacacagagagatggaaaaaggtagtccatgcaaataccaaccaaaagagagcaggagtggttaatacttatatcaacaaaatagactttaattcaaaaactgtctctagagacaaaggtcatttcttaatgacaaagggtcaattcaacaggaagacataacaattataaatgcacccagcatcagagcacctaagtatatacaacactgacagatctgcaaggagaaattgatagcactataataataggagatttcagtaccccactctcaataatggataggacatctagacagaaaatcagtaaagaagcagtagacttgaacaactggacctgtgtaacaaatggacctagctggcatatacagaactgttcagccaacagtggaagaacattcatttttctcaagtagccatggaacattctccaggatagatcacatattaggtcacaaaacaaatcttagcaaatttcagatcgaaatcataccaagtatcttttccaaccacaatggaatgaaactagaaatcagtaacagcaagaaaatgggaaaattgtttgtgaattcatttgtgaatttgcaatttggcagagcttgatcaacacagctctctgttccatataatgtctatcagctggggcaactcaatgggattggaggacatctctgaggttttcactgtcatggtgactcacgtagcctgcaagttgatgtggcagtcagtgtctcctgtgagcctctgcatggacagcttgtgtttcttgcagagtggctaaattctaagaacaaatgccccaagaaaattaggaggaagctctattgctttttatgacctagtctcagaagtcacatagtgtcacttccactgtagccaaaagtccacccagattccaggtaagggagcattagaccccacctctctatgggagtagtttcaaagtcacattgtaaggagtgccatcatcgagatattgttgcattgatttttggaaaataatttacctgcacagaggtaaattcacatcaattctttgtctccttatttcaccatccattaatgtttgtttgtttgtttgttttgagatggagttttgttcttattgcccaggctggagtgcaatggttggtctcggctcactgcaccctctctctcctgggttcaagcaattctcctgcctcagcctcccaagtagctgggattacaggcacccaccaccacacccggctaatttttgcatttttagtagagacagggtttcaccaagttggccaggctggtctcaaactcctgacttcaggtgatcacccgcctcagcctcccaaagtgctgggattacaggtgtgagccaccatgcctggccccaccatccacacccagccccaccatccattaattaagcttcatggtgttcactcagtcacactgttgtcgctctcatttgccaatgttaaatagtgatgcacagtgcctaagacaaaatcgctatcactgcaagctcctacccctggctaaatgctaatctggatttatgggacagtgacgagtgctattattttcattttataaatgaggaaactgagtcctggagggaagaaaagtcaattttcttaatgtaatacaattaaaataggattacactttgaatttccttatttcttaactagtattttatctttccatgattgtgcttaattttatcttatcagtacaagcactcatataacctgtagggatatttgtgtacatgtgcatgtgtgcatatacacacacgcactgtgtgtgtgtatatgtcaaactcagtgcttgcctttgttggatggaaattcagcagcactggaggactagacagctagaaaagccagtttcagggacaggaaatagtagagttcaaggaaaagttaggacaaggaaaatgagtctttacaaagcaaccaattcctcgtgagaagtctttgcatctcacatggctaagagacagtactttggttaggggcctggagctttggttttgatgaacagtgtgctggtattggctctaagctggggcatccaccatttggctccccatttgagtggtcactctgtctctcagagcaatgtgtggtctttcggtgttgataaagcagcaactacatgccaggccctaagggcaggcacagaggcaagcaagaccagtacagtgccccctgcaatcctcttgggacatcattttagcaggggagactaccattgaacatgtaatgataaaattgattagttatgattgagatgagcagtaggaggraaaagtgtgtggaactgtgagagctcacgatgggcctgaacttgcccagggactcagagaagtggtctggatttgcttgttgaagggtgagaggacatgtactaggtgaaccagctggaggaatctggggatccacttgtggggaggccctgggtgggaagttgtaaggacaaccagagtgatagctggcatgagaaagccagggtgacagaggtgaggagggcacatgccagatctggcagcctgcatgtcaccagatggatttaggtcacatcctkttcttccgttctcacctctttcacctccatctccacctccacctctaccccttcacctctccatgcctcacaaagttggactgtcttgcctgtgagacaggaaaggcatgtgtgatgaggggactgtacactaggggccagtccaggttttgtgagacctgaggcttatatagtagagggtggggtcttgaaggaaaaaaaaaaaaggtgaaattatgaagacaaagtttgtgcaaggcttccctaggggccatgtcagctggggacctctaagctgaagtttcactagtgtggtggggaagctccctttggcaccttccctctgtcctcaaagctcataaagcccacctttcatcttgcctgagacgttcatgccatccttacacccacttcctcctgttttcttcttagttaagatggcaaagaaagagcaaatatattgaaatctcctggaaatttggctctctccttgaccccagtagtgtccaaaagaacacaggaatttcctctttttkcccaagacttccatgatattttccctgataatcaaggaagggagtgttggctgggacacttttttcttttggaaatgtggcaggggaatatgaatttycataggcgaaattactctgtctggtcgagtctagactgttcgttggccagcacgtttgctggcgcccacactgacactctgaggtgctgcctggacttattctctgggcagggaagaaataacctggaactacattttggggaaaaaactcacgaacatgagcagtgacaaggaagaagtttaataatgagtaaattacaactaaaagttgtcaacaggctcttctctccaaattccactgaaatgagcaaagccatctaacagtagtgaagagtctctgtcatctggaacttggggaagctactgtccatagatctgaaatgtcagagaggttgagacagattgaggggaagactaacaagccctccatggaccgtagaagaaagccctaacccctctccaaatgctgctgctgatctcctggcaagcctccacagatargcccaggcccaggcacagccagcaagctctctggaaatatttgggttttgacatgccaagacttggccccagtaagggctgggtggggctttggctgttgaggcccagtcttggttagagaaaaggcactgtgtccctgttaactgctggctgccccaccaacaaactggaaagaatctcccccagtctgttgtgattccctcagcctgatggcctaattgcctttgccttttcctgttaatactgacaattcaatacagtcccattgctcaggcagaacctatttcatatataaatttcctgcatccccaaggcagagcaaatagggggaaatgaccaaactrtaatytgagagttctttactcaactggattatcattcatctaagagcatctgaaagacagtctcacacaagcaaagactgaaaggacatccaccaccacgtacctctcttgaaaaaactgcttggagaagcacttcagtagactagggaatgaatcaaataagtaatgcactgacaaaatcaaaaccacagttgacttaggcttccttggagcttggaagaaccccttcccacgctggagagctggctttttggaggtgggagtagaagccctgaggggctcaggggaggaattcccactgatttgcaagaaaggaattggccactgtgtactcgtttgccactcaatcctgccctaaccttcctctcctrtctttctcacagactgtttttgaaaggaattgccgttcagaggactgtgccgcagacctgcagcttcrgggtaaactgctgctctccaggtatgtcggtgtttccttcagagcattgttctcaggctcctttttcttgaccccrggtcccaaacctgaatgtgcagatttccccactgaagaggataaacagagttgatgggttacagtaatattctgtggttttaaaaaaatgtatgttacaaaataattataacaaaagctttgttgggaagattgtttaggtttttttgtgtgttgattgcaattccacatatctcacaatgtagcttgtatttctaatttctatgagtatttgaggggtggctattttatgcttgctgattgtattaagttgaatcatatgaaattgccaatatttgaacttttggacaatttcatatgtatgattcatcctattattaaataaaggtttatgccctcctgcctccacacacacacacacacacacacacacacacacacacacacactagtgtatgttttwacaagtwacatttctgtggcaggagagggctgaaggagaggggcaggytgccctgatccaagtgagcagatagtctccttattgtttcagggtttcctcccgcactrcatgaatcccccaaggctaaaggtgaaccgtacagcggccttctgtttcctctttgccaaccttttattttagacttcatttaggatgaaggtgctggtcctgatcatttagcctcatttcacagaatggcttccttttgaaacagttccttctgaaagactgttttagccttggggccagaaacccctctattagttttattaccatttctgaaaaacagtcactagttttggtagttatttttcaaaatgcatagtgtatcccttacttaaaactatgagagttaagtttggatgaaatgacatgaatatactattatgaaccagtgcctacactaggacattttttttattgttatactttaagttccaggatacatgtgccgaacgtgcaggtttgttacataggtatacacatgccatggtggtttgctgcacccatcaacctgtcatctacattaggtatttctcctaatgctatccctcccctaaccccccacccctgacaggccccggtgtgtgatattcccctccctgtgtccctgtgttgtcattgttcaactcccacttatgactaagaacatgcagcatttggttttctgttcttgtgttaatttgctgagaataatggtttacaccttcatccatgtccctgcaaaggacatgaactcatccttttttatggctgcatagtgttctatggtgtatctgtgccacattttctttatccagtctatcattgatgggcatttgggttggttctaagtctttgctattgtaaagagtgctgcaataaacatatgtgtgcatgtgtctttatagtagaatgattcataatcctttgggtatgtatacccagtaatgggatggctgggtcaaatggtatttctggttctaaatccttgaggaattgccacactgttttccacaatagttgaactaatttacactcccaccaacagtgtaaaagcattcctatttctccacatcctctccagcacctgttgttttcttgactttttaatgattgccattctaactggcgtgacatggtatctcattgtggttttgatttgcatttctgtaatgaccaatgatgatgagcattttttcttatatttgttggccgcataaatgtcttcttttgagaagtgtctgttcatatctttcgcctactttttgatggggttgttttttttcttgtaaatttgttttagttctttgtagattctggatattagccctttgtcagatggatagattgcaaaaattttctcccattctgtaggttgcctgttcactctgatgatagtttcttttgctgtgcagaagctctttagtttagttagatcccatttatcaattctggcttttgttgccattgcttttggtgttttagtcatgaagtctttgcccatgcctatgtcctgaatggtattgcctaggttttcttctagagtttttatggttttaggtcttacgtttaactctttaatccatcttgagttaatttttgtataaagtgtaaggaaagggtccagtttcagttttctgcatatggctaaccagttttcccaacaccatttattaagtagggaatcctttccccattgcttgtttttgtcaggtttgtcaaagatcagatgrttgtagatgtgtggtgttatttctaggcctctgttctgttccattggtctatatctctgttttggtaccagtaccatgctgttttggttactgtggccttgtagtatagtttgaagtcaggtagcatgatgcctccagctttgttcttttggcttaggattgccttggctatagggattcttttttggttccatatgaaatttaaagtagttttttctaattccatgaagaaagtcagttatagcttgatggggattgcattgactctataaattactttgagcagtatggccattttcacgatattgattctttgtttccatgagcacagactgttttttcatttgtttgtgtcctcccttatttccttgagcagtggtttgtagttctcttgaagaggtccttcacatctcttgtaagttggattcctaggtattttattctgtttgtagcaattgtgaatgggagttcactcatgatttggctctctgtttgtctattattggtgtacaggaatgcttgtgatttttgcacattgattttgtatcctgagactgctgaagttgcttatcagcttaaggagattttgggctgagactatggggttttctaaatatacaatcatgttgtctgcaaacagagacaatttgacttcctcttttcctatttgaataccctttttttccttctcttgcctgattgccctggccagaacttccaatactatgttgaataggagtgatgagcgagggcatccttgtcttgtgccagttttcagagggaatgcttccagcttttgcccattcagtatgatattggctgtgggtttgtcataaacagctcttatttttttgagatatgttccatcaatacctggtttattgagagtttttagcatgaaggggtgttgaattttgttgaagcccttttctgcatctattgagataatcatgtgtttttttttcattggttctgtttatgtgatggattatgtttattgatttgcatatgttgaaccagccttgcatcccagggatgaagccgacttgattgtggtggataaactttttgatgtgcggctggattcagtttgccagtattttattgaggattttagcattgatgttcatcagggatattgacatgaaattttcctttttcgttgtgtctctgccaggttttggtatcagatgatgctggcctcataaaatgagttagggaggagtccctcttgttctattgaatggaatagtttcagaaggaatgataccagatcctctttgtacctctggtagaattcagttgtgaatccgcctggtcctgggctttttttggttggtaggctattaattactacctcaattttagaactcgtttttggtctactcagggattcgacttcttcctggtttagttttgggagggtgtatgtgtccaggaatttatccatttcttctagattttctagtttatttgcatagaagtgtttatagtattctctgatggtagtttgtatttctgtaggattggtggtaatatcccctttatcattttttgttgtttctgtttgattctctgttttcttctttattagtgtggctagtggtctcttttgttgatcttttcaaaaaaaaaaaaaccagctcctggatttgtttattttttttttgaagggtttttcatgtctctatctccttcagttctgttctgatcttaattatytcttgtcttctgctagcttttgaatttgtttgctcttacttctctagttcttttaattatgaagttagggtgtcaattttagatctttcctgctttctcctgtgggcatttagtgctataaattttcctctaaacactgctttaggtgtgtcccagcaattctggtatgttgtgtctttgttctcattggtttcaaagaacttatttatttctgccttaatttcattatttacccagtagtcattcaggaggccattgttcagtttccatgtagttgtgcagttttgagtgagtttcttaatcttgagttctaatttgatttcactgtggtctgagagactgttatgatttctgttcttttgcatttgctgaggagtgttttacttccaattacatggtcaattttagaataagtgtgatgaggtactgagaagaatgtatattctgctgatttggggtggaaagttctgtagatgtctgttaggtctgcttggtccagaactgagttcaagttctgaatatccttgttaattttctgtctcatgatctaatatttgacagtggagtgttaaagtctcccactattattgtgtgggagtctaagtctctttgtaggtctctaagaacttgctttatgaatctgtgtgctcctgtattgggtgcatatatattgatgatagttagctcttcttgttgcatgatcccttcaccattatgtaatgccattctttatgtttttttgatctttgttgatttaaagtctgttttatcagagactaggattgcaacccctactctcttttgctttccatttgcttggtaaatattctaccatccctttattttgagcctatatgtgtctttgcacatgaaatgggtctcctgaatacagcacactgatgggtcttgactcttcatccaatttgccagtctgtgtcttttaattgggtcatttagcccatttacatttaaggttaatattgttatgtgtgaatttgaccctttcattatgatgctagccaattattttgcccattaattgatgcagcttcttcatagtgttgatggtctttacaatttggcgtgtttttgcagtggctggtactggtttttcctttccatgtttagtgcttccttcgggagctcttgtaaggcaggcctggtggtgacaaaatctcagagcatttgcttctctgtaaaaaagtttcttcttcgcttatgaagcttagtttggctggatatgaaattctggtttgaaaattcttaaagaatgttgaatattggcccccactctctgctggcttgtagggtttctgcggaaagattcactgttagtctgatgggcttccctttgtgggtaacccaacctttctctctggctgcccttaacattttttccttcatttcaaccttggtgaatctgatgattatgtgtcttgaggttggtcttcctgaggagtatctctgtagtgttctctgtatttcctgaatttgaatgttagcctgtctttctaggttggggaagttctcctggataatatcctgaagagtgttttccaacttggttccattctcctcatcactttcagatacaccaatcaaatgtaggtttggtcttttcacttagtcccattatttcttggaggctttgttcatttcttttcattcttttttctctaatcttgtcctcatgctttatttcattaagttgattttcagtctctgatatcctttcttctgcttgatcgatttggctgttgatacttgtgtatgcttcatgaagttctcgtgctgtgtttgtcagctccattgggtcatttatgttcttctctaaactggttattttagtttgcaatttctgtagcctgttttcaaggttcttagcatccttgaattgggttagaacatgctcctttagctcagaggagtttgttattacccactttctgaagcttacttctgtcaattcatcagactcattctccatccagttttgttcccttgctggtgaggagttgtgatcctttggaggagaagaggcattctgatttttggaattttcaacctttttgtgctagtttttcctcatcttcatggatttatctacctttggtctttatgttggtgactttcagatggggtttctgtatggacgtacactagtacattttaacttatgatggcacatgatctttcattcatcaaaggaaagtaatactaagattccttttcttcagtttgagtttactggaggaagatgatgtaacacacacacacacacacacacacgcacacacacacacacaaatagtcctccaaaccacttaaatattaattagcattacttttacttagggcaatagtggtagattaaaatagcacacgttttgccaagcttacaaaattacttaaaactcatggcatggatattagaattgtttcacattagtacgaaggacctcctgggattattagaggaactgactttaaagaagtttcataaatttgcagctcattaattttaattttaaataggccttccacaaagtgttttagggaaaaaataacaagaaacaaaaatatatggatttgttttgtcttgaggcagactggaaatgctggaaatttattttgsatcgtagaaaaacttcatgtggtgggaaaatgttcacttgctccaaggtcaggtattaagttagcaaagtcctaatgcttttgctacccattagtggatgatcaaatccatctctattgaattgtgcttttcttatattaagatgtaaaattcaaggctcagtatagcacctggtggctaaagctgcctccactgccccagtctggcctttcaagtgtggtcagagctagttatcctctgtgggcccagtaatcaataatgcttgaacaactagtgtggtggccaggacccagtccccccatatgtatcagctaccaattgccacaaaaaaggctgaataaaaaagtcaccccaaaactcgatgatatgaacagcaatcactgattcccatggattttcaggtcagctggcccaggctggactcagctggaccttggctgatttgtccatgcatctgggttcagcagagggtaggttctaggcttgggtgacaccattcagctctactccctgtgtctttcattttttctttggaaccagtggacaagcctgggcatattctcacagcataacagaggtacaagaaggcatgcagaaatgtgcaatgactcttaaggcctgggctcagaactggtgcacttttcctccagccttattctattggccacagcaagtcacatggccaaacccaaagtcaagggacaggaagttagtgagaggaattacaaagccacacagcaaagggcctgagtataaggaggaggtgaagacttgggacccataatgcaattgactatactatataaacagcaaggtagccctgtctcttatcctgatgccttgttgttatcagggctatttcagtctttattgcaatgccgtctctctggaattcagacatgagatctggagactgggtgagaagattttctgaacctcagaaacaatgcctttggaccgaagctctcagcctcttaggttgggttatttctcagaggacccctggcctctcaaaatagccttttggccgaatcctccattaaagaaaccttcgttgtacttttgggcccatagctgttctcacaggaaccatcagagaaatgttcattgatacttagataacaaacctgtggttcagttatatgggatttatccagacctttggatgttcactcttcagagccagggacaatgtgagggaagatacaatcagttaagtgctagtggaaaccagggtctgaatttggttggcaaaggcatagtggctccaagcagaggtaaactgctttggttatcattgagctctcttgattcattcttctctgggatggaatgtgccctcctttcttgttcaagccaggcaagtgctaggcactgggctgcagaagtgagcagtatgtgagccctgctctcctgctgtgagcagagcaagaggctgggagatagtggtaccacacagtgagtgctaggtgggttactccagggctctggagcagcttccaagaggtggtgttgagaggaatgaggactcacgcattccwagcagagggaaaatgtgagcagaagtatggagaacaggactcccatgaagatctgcaggtgtctggaatgaaggaggcagtcaggagaacacagtgagagacagggaaggagaaagggagagaaaccagattgtggaacacttatgagtctggacttcatcttgaagccagtgggagtacagccaagttgtagtgtaagtgcttttaacctaacaagaatacagccagggggccaggcgcagtggctgtgcctgtaatcccagcactttgggcggctgaggcagatggattgcttgagctcaggagtttgagactagcctgggcaacatgtcaaaactccgtctctaaaaaaacatacaaaaattagccaggcgtggcagcaagcgcctctagtcccagctactcgggaggctgaggtgggaggatcacttgagcctgggaagcagaggttgcaatgagctgagatggcaccactgcactccagcctgggbgaccgggggcaaaaaaataataataataatgcagctgggcacactccaggagccagggtggggaagggagaggagaacattgagatggtataggtcattttaccctctattcctctcagtgaaagtacgttccagcttgagttttgagtttgctcctctctccaaccataacagttcctgcttccctgccttgggtaggtctgtggggcagctgcccttcatctcagtgcaggagcagccttttcagggttggacttatgagagatgttgtgctgatttccaccatggtgcccccctcccagggcttcacaagggcaacttggacacaatttttgctttccgtgatgtctttagaacttagctctcctgttagccgtgaccttactcactgtacgaaaagtcgaagcaaaggggtcacagagaaagatttctctgatgactgtgtagacagttggtccatggtgttgtggctggaggcctctgaatacccaccagactgaggagcctttgtcttaagacagagggaaggacatctgggagtgattgtgtcacccagagtggccagagatcaagccataggaaatgctgtctgtgaccaggattcatggatgtttttattttcctctctggagagcatgaattctggcaggcctgtgatctcttaaaacaatcaactcttcaattagaagttcatgatctttaatgggcttgagtccagttccaaaacaggccattgtcaaaacgtccaggaacagggatgaaacttgtttaaaagtttctattaagcaggactgaaaattccatttgtaaaaggatgcaactatgttttgtctttttgaatactcacagtacctaagaaagcatcacatatgataaagaaaaagactatggcaagtgagctttaaaaaaattctttttttgatgcattccatcagaaatcagtggaacatttcattgctgtctggctagccaactccgataaaataaggacttttaagggagatggaaagacacagcaggatatctgtaaagccagaatcatctggtggcaacatataattgtcctatggttgtaaccttgatagtgctgttaccatgggggttgggtggtggrgcgaagtgcatttcccaaaactgttggctagctgagggatgagagctccatccatgaaaaccagtcttccagaggaggatccccaaacccagagagctatttagagtttgaaacaaattgttctccttctcaaaagtggbagaatggttagaatcatcaactgcacagcctaggtcagaagtgaagtttgtcctgttttatgaagggaaagacacccttgtttagtgagcactgaccaagcactagataccccactgaatactccatatacataaaagcactgaagtatcttaccagctgcataaccttgagcaagttgcttaacatctctgcctgttttctcctctgtgaaatggggaaaataacagcagcaccttataaggttattttgcatattaattaattaatacatatccaagtgcttctaaaagtgcttagcatataaggaaacactcagtagtgaaaactagcattattatttcatttaatcctcaacaacactgagaataaatattcttatactctttttactgaggcggtgcagaggctcaggaaggccaggttacttgctcaaggctcatgttgtatgggaaagttaaagcttggaatgtctgattctacatcgcgctctcctcctgtacattggcttctgttgtctctgggttcagctatcagctggctctagaccagaggtactaaggctagagaccttgggtaaaaagtcttcctctctttgaaagccccaatccagagaggaggtagatgggcaaaaaatccaccagcaaagatagctgccatccctcccctccattctccccatgtgctgtctgacctggaggccttgttcaatagcttttcctcctggagacacaagcaatctgtcctgctgggtcagtggcagtccttgcattgagtcagcacattcttttttttttttttttttttttagacggagtttcgctcttgttgcccaggctggcaatggcacaatctcagctcaccataacctccacctcccgggctcaagcgattctcctgcctcagcctcccgagtagctggtgttacaggcatgcaccaccatgcctggctaattttctatttttagtaaagacagggtttctccatgttggtcaggctggtctcgagcttcccatcttggcctcccaaaatgttgggattacaggcatgaaccaccgcgcctggccgagtcagcacattctttatctatgtaggttgcattttctctccttggagagcctcagattcaatggtgagcttayggctggcatgccagcagtttcctaaaatgtaatatcatcactattattgttattatatgagggaaggtgaataggaactcatcagaaacctggaaaatgttgtcagaacattagccgtgtaatttttttccccttcattgtctgcaccagctctgaagaaaaaatgcagaagtttgttgatttggagtagctggcttttttttttttttttttagatggagttttgctcttgtcacccaggctggagtagagtggtgtgatctcagctcgctgcaaccttctccgcctgggttcaagcgattctcctgcctcagcctcccgagtagctgggattacaggtacccaccatcatgcccagctaatttttgtatttttttagtagagatggggtttcaccatgttgtccaggctagtctcgaactcctgacctcaggtgatccacccaccttggcctcccaaagtgctgggattacaggtgtgagccactgtgcctggcctagctggctttaatggttgctgtttctggaatctctggctataggaatggatttctcaatggtatattcttgaaagaaaggcaaaatgctcaaccaaatggaactttttgaataagagttgacagattgctcatccttgccctcctcagaacaagtgtttgccgtttctctgatgtgggccttctttttttttccgaaaaagtctcactttgttgcccaggctggagtacagtggcgctatcttggctcactacaatttccacctcccaggttccagtgattctcctgcctcactcagcctcctgagtagctgggattataggcgcccaccaccatgcccagctaatttttatattttttagtagagatggggtttcaccatattggccaggcgggtctcgaaatcctgatctcaagcaatccacctgccttggcctcccaaagtgctgggattacaggcgtgagccaccgtgcccagcctgatgtgggctttctaggagggggcagcagatgcctctcctcacatcccagccacgcatcaaggatgaatggacatgtgggtgtcttccgtgggagttacctggcggagggtgggatttaggccccagggaaggtgaggagcagtgtaagggacagtcacactctgggaaagacatcgaagggtgacatgcccttccagagagcccagcttctgttcacctgatgagaggtgacacaatgctacggtgttcattcgtttgacaaatgtggatggagcacttgctatgggtatgccagacctggtggaaatagacacataatgctgcatcacaatgctcccagtctagaaggggagacacacatgaaaacaggtatcactaactatagtcatgatcacgatgggaatatgagggagttccccggaagcacaagggaggcagcactctacatggtctgaggttgagttctcctagaagcagaccatgagacaaggatttgagtgcaaataattgagtgagcagtgcaggaaatgaagaagtaaggaagtacacagggaagcctgcggtgaggatgtgccatagcacttgtatatcagttacttactgctgtaacaaatcaccccagaactccatgacttaaaccagccaccatttgtttagctcctgattctgtggccagctgttgaggctaggctcagctgtttgggtcttctggtctcatttgggccccctcttgcatctgcaggcaacctcgggttggttgggtgcctggctgttggtttgtggttcgctggcgttcctccgcatggtctctcctcctccagcaggctagcccaggattactcttacagtgtggccagggcccaaaatggagagcagcagtgcactagacctcatgaggcctagttccagagcaaatatattctcacttttgctacattctgttgatcaaagcaaatgtcacagggtcgcatggaaataaactctgcttcctgatgggaggagctgcaaagtcacatggcaaagggtgtgatccagagaggctgtcaatcagtgcatcatcccctgctcccacagtggatgattggcactttgtcctgcagggaaacgtacctcttggaatgactatatctgagaagtgaaggagctggagtgtttgtaccccaattcctgagattcactggttgagggctactctgggttaggtgggtggggacagttagctccctggcacttgcatccttgtctagctatgggaaaaggcccttagatacaaaaatgcagacactggcagctgaaagtcagcaaaagcattggggtcagggtggggagtgtgggaggggatggcagggacatggatgatatctcctgtacccgctttcttaaagactctcagttgatgaatttattctgaaattccaacaggagtatcatatcaccttttgacatggaggcttcttcccattagcttcctaggaatactttcatttcatgttttgccaaacacccaacattctccagtactatgataactattctctattgcattcgtctggacccttttttccccttcactagcaagcataacaatatattattgcacacatgcagaagggcatttggctttacagcaaacctatgaaccatgtatagggctccaagttttgttcccattcgctgaggacagcagcaaaggcagataagggatgtgtccacagcacgtccacaggcagagaggataagatccctgagccctgcatcatcctgggagtgacgtgggccaagcctagccatgcagcagaactctgtgtttcttaggagccctggctccagcgcagctcaggcgtaagcacaacccatgactctgggatgcccctcaattgtcttacaaagtaactcaggcattgatgtggggtagagacaagcccagcacacaagttcttccaggttgggggattttatgtgtgtacttggagccagagcatttctggtgcagaataggaagctgacagacagggattagagtcacttatctgaggtcaaaaaaattaaatagcagaggcaggagaaacacctggtgggaggctccaaagcctgatattctagcaatttgacccatgggccctcactttaaataaccattgcagcttggggaacctggcctgtctttaggtggaaacaagttttggaaattcctcctattgcagaaagcatttgatttgcaktttcctgaatgcgaggctccaagtgtagggaccgccacccaaggacgtttttctctgttgggcagactcaaagcactgagggragcttttcagggcccaccatacatgagcaacagatagctctccctacagataccatatttcagggacagccccttccctcctgagcagacactggctgagattttccagcttcgactttctagatggtgagaggatggggatgctcagagggacagtgaaggcactgaggcagtaactgtggcaaccatagaagaggctggccacgwgctcatagcggccttcctcctgagacacccgggaaggctgagtctacctcacaggtgtgcctgataaaatttttttgggcagtgttttccttggcttccaaacatagccatccattggaggttttatgtggaagcatctttccagcaggcacaatgacatggctatttcccttgtgactggacgcaaggaaaggatctatgaagagaatgtagccccgaatccctcccttctctcaacttggagcagacagggagccatgtgtggtttccttgctaagatttttgcagtttattctgtgtggctgtgtgtgttggtcccttgccaataatcctagactcacccatcccggcacaggcttktwactgtgggccaagccaaattctgaagcagcgcagttgtttgttgtctgaactcagtcttccccaacacatacttttcttgttgtcctgcacacaccctctcatcagcacccctcccaagtttgttctgagccacctgatataacctcaggtgaacaagaaggctgccctgtggctcttcacggatgaaaagccaaaggcagctgtggcttcgstttgtccccagtagtcactggccacggtgakacctgggtttaacatgacctgcccataaatcagtttgctgcaattgcagtgagagggaaggtaccttgtagaaaacctctagattttatgagcttgtttccctgactgcattccagagccacgtgtgagacttgggtttaacgtgacctgtccgtaaatcattttgctgaaattgcagtgagagggaaggtaccaggtagagaacctctagattttatgagcttgcttccctgactccattccaggtgatcttgatccamaaatgacgaggctgggtggttgccattggtgtcacacccacatcccttgctgtgcaggtgcactgctcccagctgctgtgctggctgcwagctgctcacagtggcccgtcctttggtctggaaagtcacccttgccctgcctgggagggtgacttgttagccaatggctggctgatttggggtgtggattaactccctggtgcagtttatgctgcacagctccccttggtgtctggttgaggctagattccccctgtgcccacagccttggtccactcctgccctgtccctgccccagcctggttccctggctcgccaacagatccctggawctctgccacaagctctggcttccagggaagggagcctatcctgagatgcggtagaacctcatgttttatttatctgctcttagatctcctgtccgggcaggctgattgctttttaggattccaagtttcaaaaggaaatcaaatccaatgtatttatcagacattagtgggagagaaaaaaaaacagttgctcattggctttttatttgccctcttggaattgcagaggattttgttatttttatatttaaaaaccagacttgtggagtaatgtgtgggagaccccttcaggctggtccaggggactttgtgtctttagagattgctctggacacctcttccactgaggctttgtttttaaagaggactttccagacccaagggaatggaagggggctcccttgagagaaatggctttcatacaaaatgtccttactggtggggaactgaagacaggtacagtccttactgcataaggggacagatgatgttcagttacagtcataagcctttctcaccaggagcactggactctcctttaagaaagttttctgtgataatgagatttgaactggaagaaatgctgttctttcagttaacagttgtgttttttccaagaaaaaaaagaaatacaaatgttaaaacttttttttttttttctggtgctaaagaacaatttcacctcctaagccaagaaggaaaaaattctcatctaaaccgccaggcttaaaggtggctccttgtcagtcctgaggtggtagaattgaggtgaatgaagtcaaccacagtttctaatgtcttcttatatgccttcagaaacaccatgctcacctttcctcctgctgtcctaggctgagcctgccatccctccttccctctgtccatcacagcctccccttagggtcattaactcagtccctaccactcaccttcccataggacaggtgttcttaacctggagtctatgtcctcttgctgatctgtgaacccggataaggaaatgattgcattttgttttcactaacttcacactgaaatttaacatcatattcaattatgaatgtaggaaacagactacagtaatattaccaggacctgtgactctgtcccaaatagaaatcacaggtattgtcaaatcaagttagagttattgcagatatttcaaactaccatttacattcatccctccttcagagttatagcattagatttacctccagatctttttatttaatatgttttttttaaagcatattgctaaactacacatttgtgytctcccctttcccatagggctacctcacctcccaggagaaaagattcaaaatctaggagattcataatttcaatatattccattgcttgtgactatttatggccgtatttggttcctgagctagaaacagaaaagttatggccatgacagaattacttgtcaagggactatgatggccctgctaacctgggctttcttgagctgtctgccccgctagctttgatgaaatgcacatacactgcttgcattttctgtgcaatggccaagtgtaacaggcagcacacatgtggcagatcgtagcagcgggcccttgccgggtcaagtcatacatcgctgcacaccggggctgtcttaggacattggacctccgagcagcctgcagatcttgggaattcctctgccccctaaagtattctttgtctttaatccagttgttacagtgagtgaacctgatttgttccagatgtcctaagatttagtgattccggaaactactcctaaagtcaaggctgatgaggatttgaattcctctgytagctgggaaccagcagttcttttcacagttaaacagatgaggcaggaggagggagactgagctgccttgagggacagggaggggcccactgactggcttatttgccttgttagaaagaggatggcctttgaagcaaatatcgattctaccactacatggctggggccaaagtcagctgggcagggacatggacgtgctattttttttaaagtaatacatatttaccttaattatctgaatgttgttgctagggaaaccactattttggctcagatcatcttagtaaatgcttttttctctcactttttgagcataaaactggcccaggtgggtacctatgagggaggtggaggtatttctggcttcctataagtgagtttttcaaaccagaaattcagtcccaggaatgatttccctgacccactgtaaattttaattgaggtgcgttacaggggtgcactatgatctctctctggagttaataaccatatggatctgttttgcctgattagaagggatttctaaagcatgatgagatggggaagcacaattcaaactacatggcatagtaactcactcccagaggaagttaaaacatgtatacatacatatagaatgttctgtttaatattattggtttatgcagtatttgaatatataaatatgaatataaagccacgtacagttatggatttaaaacaaaagcagaacttaattaatgttgctgtttggatttttttcaagtgtatttgaatgcagacaagtatccagatagatgctagtggaagtctgggacaagctgtataagggtatcaacccagggttcagctggagctgggccagactactaggttgtgtatttagagaaactagggcaggactgctggagaagaagctgagtggtgccaaggtagggcagtgatatggtttggctgtgtccccacctaaatctcgtcttgaattgtagctcccgtaattcccacatgttgtggcaggaacccggtgggaggtaaataaatcatgggggcgggtctttcctgtgttgttcttgtaatagtgaataagtctcacgagatctgatggttttataaaggggagttcccctgcacacactctcttgcctgccaccatgtaagacgtgactttgcttctcattcaccttccgccatggttgtgaggcctccccagccatgtggaactgtgagtcaattaaacctctttcctttataaattacccagtctcaagtatatctttattagcagtatgagaacaggctaatacaggcgggataggcacacctgagaaggaggacagggtcagataaggtggtaagctttgaacagaagaaagcgtatcataggggatgttgagcttgttgggatgaggagcatccaatgggctagagcaggtggtttagggctgaggctgtaaaccacaggggattacctatgtttatctggggcaagttgcaggataaccacaggacaagactagtagttggmcagaaataccaatttttattattctagaatagattaaaatataaaataaaattagattttctctaatatatttagaattgaacctttttgggtacaatattcttttttagtatttcttggtgatttttttttttacaacaamaaatagagcaatacctttcttggttagtaaaataaatccctaaatatttgccacaatctctagaatcttctaaatcaggaaattttaatgattttcacagcagtgaaaattgatattcatattctaaataattccatgtttcactgaaatctgcaggaatcgaaaacaataggcagtcactaactaaaatgggacagcaagacagaaacagtttcctatccctgtaggaaagagaaatctcggagctttcattgcatgaaaaccgactccattttagtacctcgttgcactttaggctttccttgtccagagttctcacacatgacagtgagctccaactacaacctattccaagctgagagtaatggactgagaatctgaaaacatgacacatcaatccattccccacctttcccctgtgagactcaaaaaaacatttcccaggctcccttgcagataagcttcttgggaagttcagccagtggcatcactggtgtgagattggagaaagggaggaggagaaaagtcagggtgtttctcctcaactccactcactttaagcagcatctctggcagtagctacttctcctccaccgtcttagctccctcttggcagtcccagtcccagtyacaatcacaacacctcctccctcagtccctccaactctaagggtgtcagcagttgcttctgatctcagcttttccttatcttaccttgtttgctcttctggttcttttcacacctttgtacctggttccccattttaatcccttctatgaactacctggcatgggttctgctttcctctctggactctgactaatacatagtgggtttgaatcctggtactgccactagttactaaataagttattaagttgtctaccttatttagtcctcaatgtctttgcaaaatggggaggaggttggtctgtaatgaattctgagatcccttgaagctttgaaaatccgtgagtctctaaattttgatctcataatacatattcatgaaatgagtgtatttttctagctccattacagagatagtttttattatttgctttctaggacatggccttagccttcataatactgtttgtttacagatttcatgaaggcatttaccctggcattgtaccactaaaggctgatgttggcggcattattcttaggagacatagaaatgtkgtggttttgagaatgggcttttatattatttggcgtagattattaaagaacagttacctgtgtcatgaaggagaggcccccagactggcactttgaatgcaaattcttctgtgacaaatccaggggaytttggaataactctcagrtatggcagtagacttaactgtaaaagctcccagcccacagaggtgagcagaggctgaggagtaaacaccataccaacattctgggacaaaatagcctgaatgctgttgtaccttggaaatgcaatagcagctgccttcctaggtggggaagctgagagyagcctcttacaggagtgcatgccctatagacagaggctcatgaacttgtgcttgctgacatgtatatcttcttcagttggtccctagtgagtctacccaaagtgaattgcactggggaaattcagaaatatacacccctcagattcaacaagggtggtatcttgtgtgtttcctttaagttataccagtttatggcaggggcaatgttcaaaatagttaagaacctgcacagcatgagcacacctacctttaagaacagttgccagtcatagagaactggtacagctcccctggtgcaacccactgatggtcagtctggggccaggggtgtctttggtcacccacacccacatttggctggactgtgaggcctgggacttgaaccacatcagtagaaattgaggctatggcacctgggatgtctccttgtgacagttacgcaagaaggaaagtgaacagaatgtggatcccaagggttgggtagggtttgtccagagccttgggtcctttccagaaggagcttgggcccctgtaattcagagatattcagattaactgatctggtctcctgccagtgacaggcctcactcactggaccattctcctattcagaaagctgacataggatcctgtagcaggaatgatcagtgctggctgcatcccttttatatttatgtgctatgctggtatgcagctactagtaactatatctctttgccttttctgcctaccaagtatcttgccagaggtactgggagtagatgtgcagccccccgcctttgcagtagccctcaaccaatgactgactagagtggacacgtaaatattccctcatcccacaaatgggataactctgttctgctcatgtgttgcacagtttcccagagctccccagcaagattaagttccaggtgctcagggagctgactggcttgatgttgctgcctttgctggttgcctgtccttctgtgtytcactctaccccttccctactggtgttttatggaaccacctctggaataaacaacttgctttcaaacctgtctccagctctgcatctgggggcrcctgcactgacattctttattccctagatctgtgtggcttgctacttttttctcccaccacatcacaggtaatgaatgaggctcatttgcacaacatacaactttggacatcagattttggtgaaactcaaaattacttggtgagaaagaaaagcacacatatgttacgctttttttttcagcatttcacaatattcactaaagcattttataagcaagtgagttgtaggagctaaatatgatcaatttttaaaaactactttttttttttttttttttgagatggaatcttgctcttttgccagactggagtgcagtggtgtgatctcggctcactgcaatttctgcctcccgggttccagccattctcctgcctcagcctcctaagtagctgggactacaggtgtgyaccaccacacccagctgatttttgtatttttagtagagacagggtttcaccatgttggccaggatggtctcaatctcttgatctcatgatccacccgccttggcctcccaaagtgctgggattacaggcatgagtcatcacgcccggcccaaaactatttactttcatttttacccaaatttatttcccctggacgtctacttcacaagcagtaacataagcaagtatgtatcattaaagatttatcacaaatcaaccatattatatcgtaagtaaagtaaaactggtgaaacaaatttaatgcagtatatcccaaaagtaattatttgagcatgtaatcaatattaaaacaactgtggagatttttacatctttgagtatctgctgtctttgaaaactcatgtgtatgttaaacttaattcagaccagccacattttaagcgctcaaatgccacatgttatctgtagcaaccatatggggcagctctggtctagcacatgaacttcagagttgtcccactcaataggcaagggagctggggtaattatacagcagttcccatcagtcattgagggttgctgcagagcatgtcagaggcttaattcttaggcactttcctggcctgcagaaaaaagccctctgacaaagagatggggatactgactagatagaactgcagtctgtgcaggttacacagtgataagaccccaggtggaaccacttatagctgactacattttttaatatcttcactttggtgttttattattgtcaaattacttgcaataatgtatcttaagttggtcactcaagaaaacttggttaaattcatgggcctagaagatcaacatcaaatctttgtcttcaagacctaagggaatctggatgtgccctacacatatctacttgcctctcgctaatctttctgctaagagtgtccttctcctgcccctttccatgttatttctgcccaccttcatcctctgatcatgtttatttttctctctggctggaatgtactccctgtttttctgcccatcaataggcagagcattttacaagcaagtgagttttaggatcattctttcagatgtggctcaattgctacctgtctctggaagcttcatgtaataacttcagtcaacagtgatatcttttccctgagtttctcttgccccttgatcttcacctgttcctttggcaggtcttatcaacttcatggtttatttcctgggtaattcatttaccagcatgcattcaggaggtgcctgacagtcctcacttattccctgtagcttaattaacaccgtctcttaattcttcatgttataatcaatttatttggtattttttgctcatatctctcatagaaagacaacagatgagcaattttggttttatggtttactcatgtttgtaattttaaactctgaaaattgaaaagctttgatagttgtcaacaaagtacccagaaagaaggttgcccatgagagtggctaaagacatctagagtcatctcaaatgcctccacaaatttcaaagaaaattgtcaagagaaaagttaagcacctcagtagcatttgtaaagagatgacaccttatgttctaaatattctcccagtattctaaaatattctaaatgctaaggaaataaacacaattttatttataatcttatagccaagtatgtttcatatacattgatactatttagttgcatttttatatgctttaggagcaatgggaaaggcaaaggagcactgactggaccaggggttagagctctgcccttgtctgctgagtggccttggggaagtcatttaactgtctgcctttatctgcaaaatggtgacccaaatgggcccccttccagctgtcaaattccatgtctgattttatgatgtctgccctttttaagaatgggaagcattgtttgtgatttcacattgcaggggctatttacatgtatgatttgcatcattgattttatgatacattgttgagagtatctgtgattttttkggaagctgaatccttactgagggcatgctgcccctagttatgatattgctcctaggaagaataaaatctgcttcacaatgtcctttttggtatgatttccatgattgagaaaactggsgattgtatgtgtagtacatctggtttatccacttgtctgtccatggacactktgggttgtgtctacccttggctactgtgaatagtgctgctatgaacatgggggaacaaatgtctctktgagttcctgctttcagtwcaytgggtaataaacccaaaagtataattttygggttatatgacaattctatgtttaattattkkgagaaatgttcatattgttttccaagcagccactcgattttacgtycctmccaacagtgcacaagggtttwaattycyccacattcttgacaatycttgtcttctgtttttttgatagttgccatcctaatagtcatgaagtgggaaaaaatagtttttaaaaagtaacagatggataaacaactaagagaaagaaggaaggagtgaaggatggacggatggacagacttggctgccctatrctattatcctagtcatcattgttaaatatagttgtggttggtagatacaataccgataataataatgatggtgtaatgagaatttttttaatgcaaatatagttggatgcatttgattaacacttgtgctagcctttactcaggctagatttatgatggcagcaaaagaaaaggtcatggtttttatgtctaagacttaaggaaaatctaagtgatccaacagaatattattaagcaccatccaaaaaattatctggatagaagaggaaatttttgctttagttgccttagtgattcagcatatgtggttgatatggaaatgtattgcatttacccaacaaggaactttgaatggtaatcctaatgtacagtgatgaatgaggacagaaaacaagttctacagagattttctggcttgacacagctgccaagatgtcatcagtaacatcttccattgagtatagtgaatgaattggtgctaaacttaagtacaaacccaataacgcagtcaaaaaaaagccagctgctataagatatacttgggtaggatttttaataacaaatgagcaatatattttcagcaggctatatatatgctgtaagataagctttatagaagcagtacactttgtatcttatgttgactactaataatgattttcatwtaaaagcacagcaaagagatccatgtacaaagtaatataacccacttaaaagactgcacaagcaaattaaaataaatggggaaatttctcagggaataaaatttcttgaagattagaaacactgttcctcaataaataagcacccctggaatgtttagcacaaaaactctatgcttgatcgttttactatttcagcaggactgtcagagaggttggtctttgtggagtcctgttcctttcaggtgtttgtaaactttcttgccaaagcccttcccgactgagatggagttgatattagagccatggctgggacaaccttcatgccaaaggaggtgtgctgctagttgcaactcagaccctgcatggcccgggtgacctcagttgggtgggttcccctttctggggctcaacttcttcatctgtaaaatgtgaagggggagctgatgatctgttgtggggatgtcatggatgttcattcattcaagtgttcactgaacacctgctaggagagaccaacctctctgacagtcctgctgaaagatgaaaacaatcaggcacggggtttttatgctgaacattccacggtgcttagttatttattgaagaagaatctttctgatattcaaggaattttattccctgagaaattatgtgccaggcactactctgtcactaggagttcaacgataagcaaagccagagaagggtcctacccctgatgtttagattctagtaggggatagacagtcctcaaccaaaaagccccacaaacaaatgcataaccacaacttcgataagtgccatgaagggttgatggggcacatggkgggtggggggctcataatgggaggatttatttcacctaggcagggagatcaggaaggatcccctggggacatgatagtcagggggctggagaatgtgggttatgttggagaggaatgagttttgaagggataggagttgctgggttctcataccagcacagcgtcttctctctcttcatctcaatttcctcatctctctaatatgggcctaatatcaagaccctttctcagtgttgtgaggtttcagaaggatgacatatttgacaacacccaatatcatgctggcacatcacattttcatttcatttctaaaaataactttggaagcagagatrtgctgttttagtcaaagacttttttagctttggagaaagaatgaaaccccagctttgagactcctctaaaaaaaatctgagttcacattctgccctggaagttgcctggctgcttcccttaatcacagagccttgtttgaatcacttgactttgaaatcccaggaatgactttgctgtgtgattaagtgacagaggcccaaggtttggggattggcagaagtttagatgtccctggcctgatcccttaccctttacatataaggaaaggaagctgatcacatgaacaactaaactggaatgaggaggcagcccctcctccatggtcctgggctcatctatactgtctccctgccaaatattccatggaaaccttggacactgtctgatgtcaggactacttatgaatgcctgtccacttccttctcaagataaagctaggttagcactctctcataactcaagcctgaggtttattcttttaatcttccaaaagcaaacagaagaacagaaataacctatccactgtttaagattaaaatggccaacaataataaataattgccacaatagcttgagatcagggtcttaatttattggaggccgttcaagaatttgcagctcttaagttaatttttcacatcttgtttggatcctcagagcccgtgcttccaaagcaaggccatcatatttctcattgcacatgttattcttgttgatgtgccagacatgcaggagagtgaggtcctctcttcacagatgggtaatgaggattccacccccccagaaattagtatttcaaagtatttttgcctatggagattttgaagagttctcttcttttgcatggtgtattagctgtattaatggttgcaaacaagaaaaacgtatgctggttaatttaagcagaaaaggaatttattaaaaggatgtggggtggttcagagcatagacaagaaggctggggaaccaacacaggcaggaaacagaggaggcaagtcttagtccagggttccacctctgggccctttactcctctgtagctacttcagatgatccctggtgtctctgtgcaaccctcaaaatttgtagccctgggtgggagcatctgttctcacatcgctgccacttgatcacccttagatcacatgatttcacttaggcaagtgcccacaccctagtgatcaagaagaggggaaagagagggtctgccccctttctgctgatgtgccgccccacctatcttgagattcccccaaaacacgaggatgtcaggatgctgagtggccaaaaataacaacygttcattatacaaacccttatatccttaattacgtcttccattaactggttatccgattaaaactggccactcacatggatttattttgttcaaaggtcgcatcacacaataatcatcagtctctcatgcatcttcatccttgtcatcttcagcctcagccttatcaccgttctcatcctagccccgttcactcacccctgtcctgggcccccatttccctccatctcctcacctctcaaacgttcacctctttctcctccaactcccagtctttcaccctacttctatttcactacaaaatagaagcaatcacagaggaattcccgcatgttcctaccacccatctactaatgcatcttcagctcacctccagccaggcgagaacagtcattcatcagaccccagcaattgttgcctgtcgtgttttcattaattgttgcctctctaatggatcattcccattagcttgcaaatatgctatgataattcccatcttrataaaaaagagcaaaaaaactccctggagcccacttcccccaccagctaccatccaatttctctgttctcctttagagaaaaactcctccaaatagttgtctgtcctcattgcttccatttgttctcctcctacatctctgaaactctctccagttaggctttcctcccatcgtgccacttcagcagttcttatcaaggtcaccagtgacctccagaaggctgattccaatggccagttctaattattcccattgttctggcctgtctgccatattggacaaaattgatccttcctttcttgagactgtcctctgtgaccatgtggrtgactcctctctcrattttcctcttccttctctagccatgcttttccagtcttgttggctgacacctcctcatcttcaactcctaaatgtgagtcctcatttctatctatactcatttcctagtgatcgtttctagtctgtcccaaatgtatcctagcccagacccctccttcaactccagactcatgcatccacctgcctcaaaatctcctttaaaacccaataggcatttggattttctctgctgaaccttctcaacccagtctttcccatctcaataaatgacaacttttctcttctagttattgaatccaaaatccttgaagcagtccttgactcctcttttcctaacacccttcatcmagtccatgagraaaatctgttggcatgacctttgaaatgtgtccagaatatgaccccttctcaccccctcagctgccatcaccctggccttcacgttcatcttctcacacctggattgtcacaagagcctcctactcaggccccctgttcctctcctggccactccacagaccgttcacatcatagccaatgcgagcctcctttaaacactaacgtcaagtcacgctgctcctctgctcagagccctgaaggggcttccgagggtcaaaccaaggtccctgtgctggccctcaaggccctgtgggatctgctgccccaactccctcagtccctctgagctcaatccttcctgctctctttatcactcctctccagctgcactgacctccttgctgttacctgcacatgccaggcacacgcccacctcaggacttctcctttgctagtccccacataccgtgtttcttgctccccttctttcttcgggtttgtactgagaagtcacctcatcagtgagacttccctgatcaccttattgtaaattgcaccccacctcccttgtaagtctggcatgttctatcttccttaccctttgtaagttttctccacagttcttaccacaatctgacagacatatttgcttctttctatgtgtgttttctctctccctgaagctaccaggactctgttttctttgctgctacttccctagcacggagtagtggctggcacatggtaggcactcagaaataaccgcatgaattcatgtacaaatgaatcccacgcttaggttgttaagtgccttatagtttttgaagtttgatgtacaagatttcatgtgagcctctaaacagtctagtgagttaggcaaggtagaaccctgtgctttacatgaggaagctgaggccctagagctaactgattgcccaaggacacatggctagttaatggggctcctggaacttgtagttctgatctcggtttctgccccccaccttcaactaccccctgtgcctcatgttatattagtgtaggcctcagggcattcattgctgtctatttttcgttacagtatggatgagaaaaccctgtatctagctttgggggctgtgaagaacatctccctaaacatctctatctccaacctcggagatgatgcctatgatgccaacgtgtccttcaatgttycccgggagctcytcttcatcaacatgtggcagmaggtaaggagggcatccctgtaaaaagagcagttgttccatctggtgcgcttgctgactttcattattgcctggamtaggcaatgattctacaagcactaatcctttctgtggactatcatttagaatgattagaacttttttcttcctgggcttagaaaacatgttggtatagccaaagaagcagccgtaaatgcccacagagtgccagagaagtgtctgtatttatgtagtctcccatcccttctctcttgtggaatcctctccctatggttttacatctggccccttcttggagatgatacagttgctgtctccagcacacacatgttctagagaattccagttttaggtcagtagttgtgaaagtaagggcagatcactgcttgtcgtgttagttattatgtatgatgtacttgatgtttctagtagagggtcactgctttggcctgtgctttggattatttatttatttattttttgagacaagtctcgctctgtcacccaggctggagtgcagtgccacaatctcggctcactgcracctccacctcctgagttcaagtgatcctcccacctcatcctcccgagtagctgggactacaggtgtgcacctggctaatttttgtattttttggtagagacagggttttgccatgttggccaggctggtctggaaatcctgacctcaagtgatccgcctgcctcagcctcccaaagtgctgggattacaggtgtgacccaccgcccctggccttcctaacatatttgagtgaattgaggtagttaaattatttccacaaattgagtgagtttttttagagtaaattaatttgaatgaagtgaagtttatatagcatgactcaaaggtacagtgctggtattctcccctacccataatcatcccgagtgtaccacctctcagaggaagtgaacaggcttccctgcagacaacaagggggaacaagtggacaaaagtcgactctgctctacccagtgttgctctaactgctgatagctgttcagctgggactgcttgcagctttttaatatttacagcattgaacrgggttgccttgttctttatgttaaaatggaaccaaaatcactttctgtggaaaaccttcactctgcccaccgatgagcactgggcatacattgagcaggtcaacggcgtttgttcaggcacatattctgtggcctcaatagtgttgacaggtttgtgccaagcctgcccagcttaggggacagctgaaatgctcagagccaccaacagtagaggcacyccaaaactttccaagaagtcatctcagattccctgctgcttcrtagcttttaggagctccagggttgagggaggccmcaaaagcaatcaaggactgcaggaggggtgtgctttccatccactttctatattctaaaaattaccgctggattaagcccagtcaagagagaaccaagtatctgtatggwycaagtatcgctggccacacacacagtatcttttacagaatcgcatgtgctgtgatgccatctccctgtgcagggtgggttggtaggtgggggaaaggggcttccttggggatttgayctgtggaactcatctctgtggtaactgaaaagatgtarttggcaactggctcattacattacacagatttctctcactcaggacccatgcgagaaatttccttccagcctcatttaagctatttccagacttagaaatagctgtccctttgcctgagaattttggcttgtttttaccttgtgactgactaggcttcattctctttattggctgctagaaagctcagagctgaccccactctgtcagtatataggacttagtcttactattttataaactcactagcctcctgtatcttgctttgctccccctttaccatgcttttctttttagcttggagattgcataatattctaccatatggatatactgtggatttaccttaaaaattcctcttattctgtatttaggttattcccagtttctatattaagtaaaattgtgagaaatgtcttttatggagattagtaccagtaaatgatcatatycttagctctataacttttcagagggtgtgaagtcacatttttgaccacctactatacaccagggactttttgcatctcgtccgcatcccctcttcactgcatgaggcacaatgtgtgtgaattattggaggagcactctcaggagaagaggggcgagggagcagggaggggcaggggatgggctgggagggatgtgctgtygggtcaaagctagccttggtctgatttatgggctgggaagaggtggggaagccctggagcataaatcactctgcagaattgtccccccttgaagctgctggggacagcatcattttctacccctgtatcgtcattggccactggagggacgcaggcgtggtgagtagcctcccaagcatgctggacaaggaggctctaggaagtcaaagacaatgtgcctgggaaggccacaggtacaagccattgrccactgtagctggccatgggaaaaatgggagcacatcattttgatctctttgccattgaattccagcaacctttgaaacctttgtcacaaggaaccctaggtttcagttcgacagaaacttgacaaagcatcaggctcttcgggacgtggtgagtgttagctccagagtggtgatggagcagggaggtatcttgtagctgctgtggaggcagggccagccagaaacgcagatgggcaagacgaccctcagggtggcaggaaaaggaagggaaaagaaacagaaactacccttccaggactccagccacgctgcaaggttgataaacagcggatgtaaatggcatcacccagcaccgggtaggattctgacaggacccagtggctagtgaggggcaccaggagagcccccccaacctgcttaacaacccacaggcctaacaggaccaacatgggcctgtgaaatattctaatgggtaaactaagaaaagcatgactaagatacagagggaaagcataagttttaaaaagattattaatagaaaacaaaagtaaattttacagagcatctactttttgatgaaagtcaaaaaaaatgaacaaagtggaagatcagacagtagaacaatagactgtatgaaaatggaatggactgggaggcaagcaaaaataaatgttatggatgggataaagaaatgttacaatgaaaccaggaaatcagtggcagaattaaaatatgttatagtcaggaaagagcagaatcagcagaacagaaaattgatttaatgatgcggaggtgtttttgagaggctctgagaattcagagaaaaagaacaaagcaataaaaaaggatgacatgaggactatattgtggaaggtagaaactggaaaacagcaaagagraaatggttccagaataattggracagaagccattccttagacagcaaaggaggatctccatttcctgaaatgggtgcagcagacaccaggcaaaaatatttaaaacattttaatgtctacaaatagcttcatgaaatttttaattttaaggatatgaaaatgatactattaacacttagcagaaaacaaagaaaccagtttctacagacttttctgtaacattaatgtccaaaattagaacagtatattccattgtgaattttaaattcaacacacagccaacttgccctccattgtgacgtcaaaataaagatatactcagatatatgagaattcataggctattacctcttccagtttggatttccccaaaagcataccctgatacaatgatacaggtacaggtagtttatttgggggtgggcgatctcagtgktgagtttagacaggaaagagaggaaagacaggaaggcrtgcatttataagcaggttactgccgtaggcaccttgggcttgtcttcctcagaccctccaagagactgtgtgtaacaaacctcacatccacttcactccaggatgaggaagctgctggaggaccgatcccccagctcctgtcattcatcatggagaaccattccctgggcatgaactctctggcacttccagccttctctaagtaggtccacactgcctggggccaggaagcaactcaggcagaaagatgtgggaagcctttgacctggaggggcatggcttcaggtgaccagaactgtggctggttctggggaatgtgagcgaggtgctrgccacatstgctatagtaaccatgagagcttcctgaaaagtagttatttactgataaactactcaagaatacaaaagtagttgaataaaaagtgtgccacagccaaataagcatagaatgaagcaaaacaatttttataaatatttacaatagtaagcaaatgtaaaaaaaagtattgccatggtaaatgcataatttaaaagattaataaaaataatcccataatctcagttataccaataacaatttgagaagaaagttgacattgtgactcctctgcttcactttcttcaggaaggagttcagactcctcagctcctcatgagaggccgtcctgagcctggtcctgcctgcctgcctttctccccagacccctggctcaccatgcccccacatactcacttgaatcagtcgccacttaataccaaagctgcctttacccaggaatcacccccaccccccatttttgtttaatgaactactatgtccttaaatctcagcttagggagcccgtgtgcaggctcctcacctggctgcacaggatctgtccacagaatagatrgatggatggatggatgggtgggtgggtggctgaatggttagataggtaggtaggtagatgactggctgggtgactgggtggatgagtgggtggatagttatgtggataggtgagtggggatggctgrctgggtggatgagtgggtatgtgggtggatgggcaggtgagtggatgactggctgggtggatgggtgtgtgagtggatggctggctgggtggatgagtggatgggtgagtggatggctggctgggtggatgggtgggcgggtaggtggatggatgattattcattttgtgcaaagttacagagactcaaggcccaggcctccaaggttacctatcttctctgtcatcacacagtccattagttatgtattagcttctaagactgaatacaaaatatcccctgcaatggatttttctgtcttctaatgcaaaactactttcatagatttattctggattattttttcctttgagggaaggctgcttataaaaacatggggtacacatggatgaccatctgctggcttttttctctcctaaataaagctaacttgaaaacacattataaaagagggcttaatttgttggtggctactctgctggctggcgtgtgctgtccagccagagcacagggtattatggccagcaactgggtttcctcaggggcaggcccagtgcaycgtgttgcctgccgggcaaggaaccagcaaagcctcactacagagtgacaattcctggggtgccctgtgggagcagtgagagggagytcctggggccgggggrtgctgcatggttaaaaaggagcataaggaagaatagataaccactgcatcacaccagggtcaccattcacactgggttccatgtaaacgacacctccacagaatataatgtgagtggtgtccctggagatgtacagctctatggccctggagtcaaggtaaagcctcattttaatwttttgcccyggagccgtttggcacaaaggactttggctcttcttgcctttgtcaaacagccatgaatttgtttggacagcagttgttgaatgcctgctaaatgctagggactgttccagccacaaggagamacaaagatctagtccctgctcccagggagctcatggcctattggggccaaaggcatgtcagtaagcaattaaagcacaaggtgccagctgctctacagaggtgctgaaacgttgtttgaagcacagatatgacaaggtgaagcaagtcattaccacagtggctagtgccatgttggacagaatccttggataagtgcttaaggtacatggatgagcctccaaaggatctgatgtcagctgattcctacattgcagagctagggtgggtggaatgagtcagtttatttggctggtgaaggaggaacctaggttggagcagggatgagagggtagaagagagcaaaggaggaggggcaggagagaaccyggtaggatggaaagaggctgcccatgttgaacaaagggccagtaacatttctkgtggcagggagatgtcaggacattttagaaatctgatgcctgctgttacaggcctgtcaggactttaccactcataggttctaagaaatctcccctccccacctcattctgttttgtttttagcccattctggatttctgcactcatgcatgcctcatgtgaccagggataggcagggagaaaaactcaaggggctggggttatgtgtacatcttcatggtattgactgttatggcatgcatggaaacagacctggacatgaaaggataagcttcaagccaggtgcatgagggctcccagctgacttttgggtgcamacaggatgcaacagcttgccacagagtgatagaggaggccatgctaggagagaagggagaacaagcagggcaggcaccctggcccgactcttacacacagtgtgagatgctctcttggtttgggtctcccagatggcgaggaattcagggaaatttctttatttgggagatgcaagaaataatggtagggggttgaagtgatatagtagggaggtgaaacaatggtagggaggtgaagttatataggcaggaggcagtgaatgaaaagtgagctgttaaaccaactactacagtgggcaatgggscttattcctgcagggcaacactaggaagagtaagggagctgggggttttatactcctttccccaagtgtcaagaattgaggtctcctggggctatttatattctccagtactcctgccctcccatatgcatggcaggagagacctacatggttttggaaaaatgctcttgggtgcagagatgccgtaatatagcccctggcagctggaagtgggctggagcaccctgagagtgcaagtaatgtggtcagggctcaccagcctctgccagagaggcccacaggattagaagtatctctaacctgagcacctcactttctagactcctagaagttgtgggttggtctgatagagcctcgctgaggttcttatacaagatctagtagcatacacctcacagtgtgcaggagttgggtgaggcaggtgtggtatgtgggtgaagaggaccagggtggggcaggaggaagcagtgaagacagtgggaagatggagggttccagcttcacccacagggcagcaggctcacagcagcattcagtggttgccaggtgggagtgaggcccagcacactctattttctaataaaaccgagagatcttatgactttggcagctaattaaaatgttttctgaacatcgtatgagccaaacaaaacatgtccagtgaccacctccagcctgcaggccaccagcctgtgacctccagcctggctgttttccgtatgttctagtccggatctgcatttctggtagaactagtctgtctgcagccttactgtgtttcatgttctccccttggcaacagataaattagtcaaagagatgagagtttggggcttcaagtgtccgagtgtctggggaaggagaggagtggagagggtcaaccggaatgtagtgtccatggaatttttagaactcatgatgttttgaaaactatttgctggctggaatatttgtacttcacagtgattgcaagaagcagctaaactggagtttgaattttagaagctgctagaagtaaaataacaggcaaccagtgtgaaatagagggaaagtgtagctttggtgaccagcagatgcagagttgagattccaactctgtttcttgtggccagtgtggccttggctcaagggtcttctctctgtgcctcagtttctttctctataaagtgggattgtgccaaggattaaatgagtcctacaccatcatgtacagtcccacttgtatatgatgggtactaccatggtagtcccgactctgccacacatgagcttatactttatagctcattcatttactcagaagagatatactgatcacctacttcagaccaagattaaatgctgagggggaagaggaaaataaggcaagaatataaaacatagaatgtatgtcagggggtgataactcttccttttaagccaaaaattatcagtcattgtcttaatgaaggattgagagagagagagagtgtgtgtgtgtgtgtgtgtgtgtgtgtgtgtctacatactgtaaaaaaaaatagagacagtgttaaactgacatctcttaatttaatgagttgcttgtacttaagaaaataaaattatatgaaaattaatgtgaagcagtaaatataggtcagtcaataaatgtctgtgttggcttttgtgactcctgattttattaaaataatgcttgttgattttttttttcccatttacttaccattttgcttaagtattggagtttttggtttagggatattgactttttaaaaccaagatatataattgttcaaatatgtgatgcacgtaatacataatagcgaagtttagataatgaggagaataatgccctccaaaaacaatggcagggggctaggtcctgactctttcagactgggcagggaggcatctggcccaaagggctggaggagtgcggtatgggattcagactttttatcaggtaggcagtaagtgaggtcttgactgagagaacagagaacgaagaacagaggctagagacatcttagaggaagaacaaagaaacagtgctgacaggccaggaaggtcagagactcagtgttgggactgctggaagaaagacaagtgaggaagaggggtgattgtgaactcagcagggagaacccagatcctctactcctgatcatgctctagcgcacagagcactgtaagctcgtgaggaatgtgcttcgyacctggcatcggttggccataagtcactgaatttggctaataagatgttgcattgtctctgatctccttgagagactgagatagatggataggccctaggtccttatttcctccatgggagggtattgtgggaggggtgatgatgttcgaagggaagctcatttttgctgtttctaaggagtataatttgagttccaaattaaactggtcttccaagttggggtttggaggcagtaaagcaccaggtcaactttcaaggctttcagtggctaattttttatgacagaaggcatcgagggcttgtaagtttgtttttcttatcaagtgattcttcagattatatctacctttaccacagaaagggtggtccctttctttcaggagtggttctctcttcactttcaaggcaaaccgctcaagatggcaccaggtgataaaacagatccacttgctaatctggatagagcaggaaggacttaaacatttatgtgtttgtatacctttatttgagggagtgctttggcctgtttttagacagaaggttccatacagaaactgcatctgggcaggagaacaaagcaaattgtgttacagccgggaaaccaagcattgagcaacagaatggttcttaggcagaagtgagcctcatccctcagtgctgggacagattacagccttccttcactgccgctttcattcagcgcagggactgattttcattgtgttctgctttctctggtgtctcttgtcaagttaatagtagcctcaagtaaaattcaacccttagatgtttatagtcatcttggcctggccattaagatgatgaatgaacttgctgcttgccctggtaagagagccctgagggtggatgccgatacttagaaaataataagtcttttccgcccccttcctgtctttaatccagtgccccaagccccctggtgactttaccttgaacttcctgtataacgccaggtagaaaagcctcacctggctggaagcccactcgaggctctaacacaacagcaagctctttatcttgctttgttggtcttccccatccgcttatcagatggaaactcggcattcctcagagacccttcagtgtttctcagttgcttctgcaggcccttcccttcctccttgagaggacaagagaaggtggcggggagcaggcacccccagcctgtgtttgtatttcctcacctggattacctgtggcccttgcatcagggagagcccagccttgagtgaaactgcctgggagacaggctgggcgcttcctgcggcagtcggcagtgaggaagtggtggagaaacgcagatgtccatttcaaatcacaaggcggcttcagtattccrccgcggggctcagctttcacgtatatgaaaagcttcatttgtgtattcactgcgtttggaaggaaggctatgttttgctttagaaatgtcaacagagctgtagttacgacaaggatcaattaagaaggacgtttcccagagccgcaagacttgagtgaatctgtggggggaatttagaaaacatgtgttaaacctctagatttctttttttctaactaactgcaaaacagcaatttaataatttcctcttttaaggggaaaggggggagtcttggattttaaatcttcctaaagcagcacagcatctcttgaaaagaaagccatgaaagactactaagctaaggcgaataaaataaaattttcaaaaatcgagaacttcagtgtcctagtctgggtttccctgagcagatcctgagatgagggctcacatgcaagtggttcataaaggatgtgtttccgggggaagacaggtagggagtggagagacgcaggacagggcaggactgaaactcaggcagggtccctcagagcgtggcctcagcctgatgctgcaagggggatcagaggtgtgagttacgccaaggtactgttccatctccagcttaggaagctgagttttgttctcccrtaaacaccagtcattggttaagggccacttagggaggaataagtggtagaaagtggtcctaggcactttccacccaggggtgaagtgtagacagtggggcttcaatagcttaagggcagaagaagacccacggttctggctcttggagccaaacgaagactgaagccacagtgtgcatgtaaagggagtccaaggagcattgggtggggcattgaaattgtttgctacagtcggtttaccttyaactggtttccttcttgttctgaaggatatattacaagcatattgacaaaagtctttgaactcttgaggtgtttgtatgatattctgtgtcagttgcacatgggatgtttctaccagcatctgaattggggaattgacatatacagatgcccgtggaatttaacagagaatgtgaatgtacggctacagtccgtcaccatccagcttgccagggctgtcatttcatccttttgaggccaggcttacagacagtctgggcttccactgcccccatgctctgcctgtgatgtgtggtggcctctggcattgttgtaactcaggcacctgagcataactagtgagcctgtcctgctctcccaagcaagtctgtgtttaaaatcagttaggaatatgttgggctgcatgtaacagaaaagccaccttttttagcagctgatccttgtgagacttttatttttctttggtaataataaaataagaaatgggcatttcagggctagtatgcacctgtgtggtacccacaggaaccccattccttctgtctttcctctmagcctgtcttcataggggttttcatctccatactccaaggctgggctttccctgatggtgctttttggtttccgcttccaacactacagctgcattccaagcaagaaggagaaggacaaagggcaaaaggtctgcctccttttaaagagctttcctaaagctccacttgacattttccacatatatctcattggccagcaccatgccacaaggtggggtggcaaatgaattttctcagctgggcacattgctactctagacagagtcagagttgtgtttattgggaggaagggaagagtggccattgggaagcaccagcagagtcagcagggcagagacctgagagaggtagtttgtgagtgtgtatccctgagatacgtagcagaactggggaaggactgcccagtgagtctactcccttcagtatttgtcagatcytgctcaattataagatgatctttatctgtccgccttatctatcttcactgacgtgtatttcttattttcacaaaatgaagccatttcaacgatgttgtcaatgtgtttggatttctgtccttcaacagaggtgccacagctccatactaggtcaatccatgcaataaagaccaagttccagaacccctgtccttcagaccatttggtatatataatttccaggcccttcttcactgttctgtttatcactccctgtgctgtctctagtttggcatcttcctttttaaaatagaacccaggcttgaactgcaattcaaccagcccagcatagttattattgtcccgagtctaaacatgatatttctgttaatgtggtagccacagcacaattctatttattcttgaggcattccctcttttattttcttggtctttttgtgttatttggaagtgtaatcatgtcatttatacccttgctactcgaatatggtccatgaaccagcatggtgacgtcacctgggagtgtgttagaaatgcagaatctcaggccgcagccctccggggtcaggatatgcattttaacaagatcgttgggtatctgtatgaaaatgaaaaattgaaaccagggcgagatatccagggcctcagaggaaaatctcaaaatggtcagggaggtcccttcttagagatgagaaagtcactcagaggctgccatggcctaagactgagacaaagagaatatgtctgtatacaactaaagaaaaagagaaaaggttcgctgggccagagagtggctagagactcgattgtactcagacttgctgtattaccaacaggtaatgtacaggacagtcatgacctacacctggctaaatccagtagtcatttttcagtcttctttctggacccgtcagcatctattagtacaaataacgactacttctgttattattattattattattattattattattattattattatactttaagttctagggtacatgtgcacaacgtgcaggtttgttacataggtatacatgtgccatgttggtttgctgcacccattaactcatcatttacattagatatttctcctaatgctgtccctccccttgcccccaaccccacgacaggcccccatgtgtgatgttccccttcttgtgtccaagtgttctcattgttcaattcccacctatgagtgagaacatggggtgtttggttttctatccttgtgatagtttgctcagaatgatggtttccagcttcatccatgtccctgcaaaggacatgaactcatccctttttatggctacatagtattccatggtgtatatgtgccacattttcttaatctagtctattattgatggacatttgggttggttccaagtttttgctrttggaaatagtgctgcaataaacatacgtgtgcatgttctttatagcagcatgatttataatcctttgggtatacacccaataatgggatggctgggtcaaatggtgtttctagttctagatccttgaggaatcaccacactgtcttccacaatggttgaactagttgacagtcccaccaacagtgtaaaagcattcctatttctccacatcctctccagcatctgtggtttcctgactttttaatgatygccattctaactggtgtgagatgatatcttattgtggttttgatttgcatttctctgatggccagtgatgatgagcattttttcatgtgtcttttggctgcataaatgtcttcttttgagaagtgtctgttcatatcctttgcccacttttggatggcattgtttgttttttttcttgtacatttgtttaagttctttgtagattctggatattagccctttgtcagatgggtagattgcaaaaattttctcccattttgtaggttgcctgttcactctgatggtagtttcctttgctgtgcagaagctctttagtttaattagatcccatttgtcaattttggcttttgttgccattgcttttggtgttttagacatgaagtccttgcctatgcctatgtcctgaatgatattgyctaggttttmttctagggtttttatggttttaggtctaacatctaagtttttaatctatcttgaattaatttttgtataagrtgtaaggaagagatcccgttttccatcatatgaatatgccacaatatgttttctccattatcctgatgatggacattgaagttgtttctggttttatcttttgtgaataaggatactaagaacatttttataccagttttcgtgtgcatgttttttttcatttattgagtaaatgctagtgagtgtaggtgctggctcaaagggtcactgtttagctttattagaaactgccaaatagcttttcaaagtggttctgccttttacaccctcaccagcaatgtataagagtttgagttggtccccatccttgtatattcagtattgtcagtcatttttattttagccattctggtgtrtaattgtgtttctttgtgatttagagctgcatctcccatatgactaataaacacgttttcacgtgcccctcagccattggracacttattttagcctgttcaagtcttctgcactcccttcttctggggatacttttctyctcctgtgctgtggtacactcctcaccccaattcttctcactcgccactccttttctgcttcctttgttggggtctccttatcttgccaacctttcaacattggagagcctcagggtgcggtcctgagaatgcttttcttctgtgtatacgcattccctggatgaactggtcaagtctcataacttcatatcatggacatgctgacaactcccaaattttcccctccagcccagagctcactcctgaactccagcgttgggtaccaaattgcctgtttggcctctccacttgctgtctaacacatttctcacacttaagatgtccaaaatgagttcctgatcctcctgacacctgttccatttgtaggaaacagtaactccatccttcttggctctcccttttctctcatacaccacatctatttctcaaacaccctgttggctgatcctacagagtatctcataatccagccagttctcaccatcaccattggttccatcttggtccaagtcaccatcgtcttttgcctcattattgattggcaatagccttcttcataattggtttccgtgcttccacctttacctcttacactcctcctcttacactcctttgctcagaagtctccagtggcttctcatctcattgtaaagcttagttttttataatacctctaaggccctagaagatctgaccccgttgctgcctctctgaacatgtgtcctgtcactttcttccttgtagcctcagtggcctccttctgttccttgaaacacactaagcttatccctgcctcagggcgttgacactggctcttcccttaaataggcacatagcccactccccatttccttcttgtctgtgcttaaatgtcacctgattagaaatatcctactactccaaacaccctatctgtcctctttatcttgcttttctctatagaacctatgaccatctggcatactatttttttgttttgttttcttgaaacagagtctccctctgtcacccagactggagtgcagtggcatgatcttggctcactgcaacctccgcctccctggttcaagcaattctcctcctcaacctcccaagtagctgggattataggtgcatgctaccatgctcagctaattttttgtctttttagtagagatggggtttcaccatgttggctaggctggtctcgaattcctggcctcaagtgatcctccctccttggcctcccaaagtgctgggatgacaggtgtgagccactgcacctagccggacatactatttgtttgttgctggttgtcttagtcctcctacyggaattaggttaggtttctacatataatatgcaatgacttttttgagacaaggtctcactctgttgcccaggatagagtgcagtgacatgatcttggctcactgcaacctccacctcccaggctcaagcgatcctcccagcctccggagtagttgggaatacaggcatgcaccaccacacctggstaatttttgtattttctgtagagatgggggttttgccatgttgcccaggctggtcttgaactcctgagctcaagtgatccacccacctcagcctcccaaagtgctggagattacagagtgagccaccacacccggcctggaatgactttttattcattgattcatacctagtaactgcagcagtgcctggatgtgtggtaggatctcaatctttgttgaataaactaatggatggtgggcaaataaatggatagaagatgggtatatctatctttctctgtactttatgagcactctttcaattattgttttatattacaccagtaatttttaagtagtgttaaaaactagtaaacaatgtaggggtttggagaaaaatgctaattccttatctcccggaaaagggaaaccatcaggaatcagaaatggagaaatgcttcccccacctggtgattgcatcttgctgtatgggatcaggcctgaaaagtgagttaagtctgttggtgctggaactcatcactgaggarcagcctatgtctgtgccttcaggggtgacagacagtggaccaaggccatgcctgcatattcctccctggacccctcattcaaagccagaatctctttcctgccagagcagtcctttgtccacrtgggtttctgcagtagcccaagtttgcaggcccttgatagggctggagtgtgagctgtaatcctatgggcttgaaataatctctgctatgggctctttaaaataaccccaagtaacactcatgtcttatttaggtatccccagaagcaaaccctgagataagaattcaagtgtaaagtacctgtagtttgtttgggaggtgaagatagggggatatattaggaagtgagacagagaaaagaaaacaggagaaaaggacagagtgtcaagccagccacaactatgggcagctgggcttactcccactggggaaccctgggtccacagagcaagctccttggggttcttctgcctgcgtggtgaggagtctggggcctttatccacctgctcccagcagctgttgattgagggctgctcctgaaggcattaagatcttgacacttctggcctgttgtttgcaggggcagagcagttttatgacaagaaaaagtcctcaggtgaaaaaatgcaggtgtcagcaggtggagacacagggcaggggatctggaggaacatcagtggggtctgcgacaacctgtgaccacctcacagacaaggtgacttctggcttctcagtgactcagccacacttctctttttcactcactcttctttctggtcctcactaagacaaaatacagaatacagagcagcagttcacgggctatagcatttraggagattaaatacaggcctccaaccacacaggccatctggaagctttggcctccagatgaggacataacgaggtcatctctgctttcagggagctctcagagtctcaggaacagatgtacatggtccatcagagtgtggctcagggcccagggtgggttggggaaaaggtgagttatttagcattggaggagcctgtttgtagccatggctgccaacatgcatgagccacttagaagggcttagggtggtgagggtacaggtctacctgtgaagctgagtgatagtcacggtaattacagtcacctactatagcctcacaatgagccattataaaaatgaggaaactggggctccagaaagatttctcagccccaggacggtgcagccaggaaatatcatagctgggatttgagcccagcttgtctggacactgagcctgtgttttgcacactatgcacacacttctcccagatgaagatttgccttcatccaaggggaatgtctgtgtgagacagtggcagcctctgatgggttcctgccgattggcaaggtggttagagctgtgtattgagaggtcttctccaaggtatcagttttyctctgggagggttaaagaaggaccttgcaaagcccatggcctttgaatagagagctctgttctgtttgcagtgactcccctcaaaaggcagaatgcaattctctaaagggaaaaaaaaatgaggtggctgctctctggggttaagcagagaaaaccgtcaggcaggagaggtggggctgtatttgagagggtgggagtggcccaggagacctcacggtacagtcagctgcaggagaggagctgctaaccctcatcttaagaatatcactctcttgacaatcacagttgggaaatgtgtaatctcagggtgcctccttgcccgggcatcttcattataaaagcttagtctttctaaatgcagccaagctctcctctgacaagagatgtgagaattccgttgacactcactgaccacctagaaaccagagacccagaaacccaaaggtgggtcacatggtcgccctgtccctggggaatgcacaggaaaagagctctgcctcccggaaggttccaggtgttggggtaaatagagatcctgctgctgcctctactcccttactggtctccctggggacrtatttgaacatattttactcataaattctcatctcagggtctgtttctaaccagacctaaaacagacaggtcccccccttttttaatcagtaactttggtttattacagcagaaacttcccaaattactgatctgaccaattagatatgttttaatttttttatgaccggaatcttttccttcaaatgaacctgtttggattctcttatctgtgcaatacaacctaatgtaagtctactttgtaagtatttgttctgagattatttgttctgaaggaggcccaatccagttcagttaaatctgaagtttttgatcaattgggttgctgagattacaactttctttttcattaactattagtacttaaaatattgacatgctaagtttttagtcttctcttttttgacctataaaaaaggtcaattatatcttaaaagtttcaccttctatttggctattgtgtatcattctttaaatatctggctgggttcaacttgctaagattttatttagtatatttgtatctatagtcataaacaagatttcyctgtaatttyctttcttgtcaggttttggtgtcagatttctgctagtgtttgcaaaaataagcagraagcttgcacttttctctgttctctgaagrcatacaaccaacatagttgcaacagcaggcagtgagagctgacccttactgagascttgtttatgtgccagaggctgctcaacactttttattaacgtgtttaaccctcacagcaacccagtgaggtatgtgcagttaccatctcagttttcctgatgaggaaaccatggcttagcaagcttaaggaggtgactcaacttccttagtgagtggtggggctgggattcaggcacaggcaggctggtacttaatctctctcctacaaataccagcttccttggtgagtattggggctggggttcaggsacaggcaggctgactccagtgtgctctaatgcatcttctttgcataaagaggcttatttacatgtcttttggggtatgctggctgctcacgtggctttgtagacattaccctctggagtgccaggtgctttgtgaattagatctttcttattacatcacggccagttttttgtggaggggggcaatgggcaaggaagcattgatgaattttctgagacagctgcgatttgtctaaacaaggcttttccttcagtacccaaggattctggcacacagacccagctccccaccagcctcccctggaatgagctttcctgaggtgcccgcgtgtctccactccaggtcctggaaagctggcagcagcctcactcttgggttttcctctctggaattaatttgtccccaagtgaactcaaataaaaggaagagcacctatgagagctttgcctttgactggggctgggaaggtggaaatagcatggtctatcctgttttctcatttgcccgttgagcactgaacgactggaagtagagtatgatgtgaagtcttaccctttgtgagtcagggggcttgggctgtctgcacacactgtctccaactccaccaccaccatccaactcaggcccaatatcactgggaaaaacccagatcccctacagaaatacaacaccggtgacttgctggatgctggtggctttgtgctattggcatggtgggtctgaaactcttgtagacaccaaagaaattggtaggttatggaatgattgattatatcctgtgtcagctggaatcctgcgacatgttctagtttcctagtgtgcagagtacaatgtgggcaatgctgggttgtagaacatctgtgattttcatgggataaaagcccttatttttgttttgttttattttaagtcaaaagcaatttctaccagtaagagactgaatgaataacaggaagccccttgtttgcatggttcagaactaggcattgcaaagataaccatttactctgatttcagaggtctaaaggtgttagttcccctcttagaagtaccaaacttacaaatgggaaagtggatgcttagaatggcatgaatgttggctggcttgatcatgagtgggatcacgatggcattcactctttcattcagcaaagttatgtgttaacaggtattaagtataccgttatcatttttccttactttagaagataagccaaaaaatttgaccttaatgaaaatagaggatttttaatggagatcagaattttcacttataaaagtaccatttacacatttcgtcactgctgacagtcattagctagtggatagatccaagctttaaatctgaatcttgtcayaggaggatggaagctcaagttgttaaaggcctaaaaggttgcatgttacatatagaacaaggccctgggaaaggaaatggtctgttgaaagtcacaaggccaaatggcataccaggtttttggtccttgtttaagaaaaccaaatgtaggttcagaatagtttcttctttcttccacgtctctgaaagtccagcttcgtgtgggagagctctgaggccctctcccagccctcgtttttcagctcggggttaccacgtgtattccgtgaaatgctctacctgctttctgtatcggctttctagccagttgcagtgtacaatattagttttggctttgggaaatgaggtttctttgacttggctggaagtatacagcaaccattttatttttcttgtgcctcatgaattaatagggcagtgagaggaaagagcatgcatactgagcatctgagcttttttaaagcaaygattcacccagctttctagtataaaaaacttcctctggcccaccccgagcaaaccctcattcactgctcagtcctcccatttgttcatctggaaagaaggaatgttctagtggggccaggccccatgtggtatcttccttttctgaagtcatccattcattctcttcctggtggggacttaaggttggaggcagcaaaaagtggaaagactggtagatagtctgtcagctctgtggggtgggtgtgccatttggggggaaatgaaaccagaggaagtttggctttgcagagtgaggacccaggcaagttcattttttacactctggttccatctccttccccctgcacacatgagtcagctcccaggaggaccccgtgtccttgactcttccttgctgtctcttcaagctatcaatatgccctctctctatcttctccctctggaattctccctttccgtctcagttggactatctggactttttgattctgcttcttcccaaagtgctcttttcagtccattgtttttcctgagatgtaatgactcaagggtaaatggtacctgtcagttgcaacgcctgaaaccatagatgcataggtgcaggtggtttatttgagtagcgccccagaaagtaagaaagaaggaagaaaaggagggtatgtctttgaggtcactgccattggtgctaagacttttttgagaagcatatagaaagtcacctagaaatgcttacctataggacaggagactggagcactcacgccccagctccaatcccaggttgttaagggccacctccaaggaatggattgtcctgccctggccaggggtgtcattgagtttgggtgccctcagaatgctactgaagatggtacaaagctgaaatcatcagagttgggccagaaagaagtgacacagaacatctaaggcatatcataaaccatttctgaccctgatctcggaacaggatcccagaacagttcaacctgtaattgctttctgacatttgagcaaaagcatcagtagctcttctcatgaccacaatcagtttactaggatttttccataggctcaaagaaaagacagtctatgttctaagtacagatgaagaagtaaaagtttgtgttctggaggggtggggcttcaatctagaccttgcctctttctgatcactgttcttgacactggatctaaattaagaaaaacattaaatctaaaaatgtctaaaaagttaggacatttaacctatactatacaagaagttatcagctaagcaaataaaatccagactttgaaaaaggtaaataaggaactgatttactttaatcacaagttccttctgcttacaaaatgattcatactgaaatttttaaaaaatttcttaacagagtttagtgcaattcacataaaaaatgtacttcagtaatttgcaaatatttacttaaggatttagtaatttagtaatgtttagtaattttttcaacaagttcttttctgtttaagtgggttctcagaagtggttgcaccttcagcaggcaaggaaaatatttatttgaagacgtttatgaaacacctcccttgtttttattatgtttgtgttcttcttatatttctttttatttgcagtaccctcaagtactttgaaggtttggggacagtaaataaaattgatggccattttttgtcatgcatcttctgaattggtatgtttttctgtgttcagaatgtcattcctcagcccccaggggacataagtacaaagtgaaatgaggcgatgtcaggatcacctgtgcacattctgcttctctccaggccctggcttctcttctttccggtagatgaacttgagcacatgatctcaccacttggagcctagtaaaatccatgctactgttctgcaattgttcttttattytttctctctactaatgttttcacctatggatgtcagttctacttctccttggrgctttaactaaaaaggaagaattgtctgtggcttcttagaaagtggtgtgtggacaggcaagggctgccctgcccttggctggcagcacaggctctgcaaagggggtgggtgagtgaccacatcatcatggctaccccttcccgagtgcttcctgtgggctaggcagggcccaggtagctcaaaggtgttcccatttgttcttcacagcagctctgaattcattagcataacaaaccacccccaaatctagtgggcttaatacagcaatcatttctatttgctcataactctaggggttagctaggcagtttttcagttctgggccaggctcggctgttcttggccaaccttactcatgtgtctgtggttagctgcaggtcagctggaacccaaatgttgtctggaacaaggggagtgatttagctagtggctctcatccccagcaggctggcccaggctcctgtagggttccaaaagagtgagtagaagttccaaggctttttgaaatctaggcctggaacagacagcatcatttctgctgcattctgttggtgagagcaagtcatgatttcagctcaaattcaaggtgggggaataaaatctacctcgtgatgggagtagctgcgaagtcaaaactgcaagggatgtagttaaagggagggttggagagtgggcgtttttgcaaactatctaccccaacctctgagcggtaggtataattatcccagtggttctcaaccaagggtaattttgtctcctaagacacagttcacaacttttggagaaatttttggtttccacaactagttcagcgctattagcatctagtgggtatgccagggatgctgctaaataccccacaatgcacaggacagctccccacacaacaaggaattatccaacaatgcacaggacagctccccacacaacaaggaattatccaacaatgcacaggacagctccccacacaacaaggaattatccaacaatgcacaggacagctccccacacaacaaggaattatccaacaatgcacaggacagctccccacacaacaaggaattatccaacaatgcacaggacagctccccacacaacaaggaattatccaacaatgcacaggacagctccccacacaacaaggaattatccaacaatgcacaggacagctccccacacaacaaggaattatccaacaatgcacaggacagctccccacacaaccaagaattatccaacaatgcacaggacagctccccacacaacaaggaattatccaacaatgcacaggacagctccccacacaacaaggaattatccaacaatgcacaggacagctccccacacaaccaaggaattatccaacaatgcacaggacagctccccacacaaccaaaaattatccaacaatgcacaggacagctccccacacaacaaggaattatccaacaatgcacaggacagctccccacacaacaaggaattatccaacaatgcacaggacagctccccacacaacaaggaattatccaacaatgcacaggacagctccccacacaacaaggaattatccaacaatgcacaggacagctccccacacaacaaggaattatccaacaatgcacaggacagctccccacacaacaaggaattatccaacaatgcacaggacagctctccacacaacaargaattatccaacaatgcacaggacagctccccayacaacaargaattatccagccccaatgccaacagcattgaggctgagaaaccctggattatccctttttacacatgagatgagggtcttacaggtcttctaagtggtggagcctaggtttaatcccatttccgtactcttcagcactcactgtgctagtatccctctcaggcgtatgaatacgtcaagccacttcagcatgatggcgtttaagttttagcttgtctacaaagcagcacaatacagtggttaagagtagggttttgtcaccagactttctggcttaaatctgctcccatcccagcaccacttaatatgtgttgtaccttgggcaagttcaatgatgtctctgccttggccttagttttcttcttcttttttttaatgctgcctcaattacagaacagatgcctaagttttcttatctgtgagactgagctaagaataatgttgacctyataaatttgttgcaaagattaaattagacattcatgtaaagcacttaggaccatacctgagacatagtagcctttagttatttttgtctaattcttctttccctgatacagtgcccaccataaatccccagtcatggtgctgacctggcatgtgaarctggctgggaggaaagagatttttctctcccagcaaagtagtaaacaggctctctcaagcattcatccatctggggagcttggcacacaggacagatcctttctcttaagtgtcccaaggccaaccctgaaccwtggaagccttcatttaccatcastttttctttcaaaacttctgcaagggcataaaaatgggggactaaatagggaccaaataagtgagtccatgctttggaaatgatgacctgagagtgtgaggaaggggagagccaggagctgagtggcagcattgcgggagggctcttcctcccttggttggcagatgggcgggtgtgactgaggctcaccatgggtggactgagcagacgcctgccctcacacacaaccccatgctttcagaagaaggcgtcagacctccttgtatgggaacatcatcaccttcacgctttgtctttaatttgagaagcttatgtggaaggaaacagcacattcttgtgagaagataggttttggaaagtccggagtagacagcatgaatccagggtttctaaagtataccctctccatgcttgctactcaggaagcagaggcaggagaatcgcttgaacccaagaggcggaagttgcagtgagccaagatagcgccactgcactccagcctgggtgacaagcgcgaaactctgtgaaactttcattctgacagtaggaagaggaaaagactctggctgactccttgtgatagagcaaaccaagttgagtgttgtatttacttttctggatttattttcacaaatattcagctcagaatgtgccagggaggggaggaacacaggagctgtattggccacagccatgtgcgtcatcccaggggacacttatgtgagccctgtggagcaggaattgttattcccatcttacaggggtgacagcttagctcagaaagcttgcagtttgctccacgttacaaagctagtaagtagcagagctgagattggaacccycgtccgtctaatggcaatgcttcctcttttgctattctgcctcacaattaaatggagtaggacctgatccccgacatcgagaaactgacggtgttgtcaagaaataaatatcccccccccacacacataaatagagaacaataaaagataacgtcrgaggatgaacccacgagcgtggtttgtgtgggaggatgtcttgatcctgggctcgcagggctgtccgctgaacatgacagttatcctggcttcacagtaacctttcagaggtgctctgagtcctgaacatcggagatagattctttatctggggagtgactacataatttaaccatttgttattttttattttatcagactgggatcctttaggagctgaaagggacagtatgaataattagccctaggacaacaggcagaaaccgggactgccccaggcagttaagatgcatggtgaccccacttaatggccaaaatacaaggaaggcttggtgtctccgcagcttcctgaagagggaatgaggggcaaggctctggcctcgcagccagctgagggagcgcttctctttccactgtctgattctgggtctctgcttcctcatctggatagcagccctaacacccactgtattagttatctgttgctgtgtcacaaatcacatgtcaaaacctagtagcttaaaacaacattgattagccctcatagygggttggggattccagagtggytctggctcgaggtctcttatgagactgcagycaggatgttggctggggatgcagttgtctgaaggctccactggaggatctgcttcccttgtggcccctcgcttggctggctgttggccacaggccacagagcactcaggaccaaggactggagtggtggaaccctcgtccttcattaacacaagcagggcaggaggatgagggtttgtacctgctgttggcaggggggcctcagttcttcagttcttctccatatgggtccctccaacaggtagctcaagtgttccaccatgtagtgactgactttccccaatgaaaccatccaggagagcaagaactgggcagaagctcgcctttccatgacctctcagaagtcacatagcatcacttctgccacattctgtttttcaaaatcgagccactaagtctggcctacattcaaggggaggagaatcatagctcactgtaaccttgaactcttgggctcaagtaatccttccacctcagcctctggagtagctgggactatagtcacgtgccaccacgtcctgctcattttttaatttttcgtagagatggtgtcttgctgtgttgcccaggctggcctcaaactcctggcctcaagtgaccctcccacctgagcctctcacagtgctaggattataggtgtgagccagtgcaccttgcctaggcttcacctttcaaagggaggagtgtcaaataatttgtgaacatattttaaaaccactgtacttagggtcaatgttctacacttataagttaagtaccatgtgtaaagtgcctgcagcagtacctggcacccattaaaaacagaatcttggccctccagagtccagcagctgcacttctgaatgctggtgggcacggacggggtttgatgtccagtaagcctgagcagccctgcaaatacagatgagcccaagtcacctgtacagttggggcctgaggaagttaggtcagttctgaggctcccccagatgtgggacactcctcacggacaagttcagtgttgtatttacttttctggatttattttcacaaatattcagctyagaatgtgccagggaggggaggaacatacctcctatgcggcaggagctgtattgggcacagccacgagtgtcatcccagggaactcatgtgagccctgtggagcaggctctgagcctcccccagatgtgggacactcctcaagggtttccaggtgaccacagagggtcccacctcagtgtggacatttccatgtgtcctcctgaaaccctctggtgagcatccccacccaccctttggtgtctggagccatggtggctggttgtccttcccacttaggggaaccaggcctcagaactacagctcagaggcctactctgtgggctgtccttttttctagggccttgattaaatttgcttctctgaacactgtgaggtatctgtacttgttttaactcttctagtgacagcaatagaaaacctaaattggtgtaggtaaaagagaatgtagggttttgcaaactgaaagtacctggggttggcttcgaccacagcttctggttggacctctggaagttgtcatagtgtctctttctctctctccatctgtcagcttctcttcctccttttggcttcgttctcaaacaggctctctgtcccttcagggtggcaaaatggttgccaggctacagtaaataaataatctcatttcctaaaagttcttgcaaaaatgtcatagagtctgattggtccaattgagttaagcctgggtcgcatgcccacctcctaacgggttgggagtgaggtggagtggggaggggatggctccccagagggaagggtagatggatgtgggtggcaagaaacatgtctgccatggtattgttatcctcatttaccaatgaagtgttggcactcagagcaggcaagtagcttggccagagtctcacagataatagcaggtgcagaccgtcatcctcctgccccactagtgttgatgaaggacgagggtctcacctttccagtccttggtcctgagtgctctgtggccatcttccacttaaagctctaggacagaccagcagctctggaagtgactggattaaaaccccaccaactgaagacagtggcgtgggatgatggctcgctgatgggagacagaatttctgtctctcctstcagaagccctttgaagaactcagctgtctggacaacaaaagtgggagcttttgttgtctagaagttcatgtgacctttcctttcaccttttagtgctgcctaagtgtaagatttaagcacagcattcttttcccatgtgtcatttttcagcagttaaaaatccatcagctgaggccacacaaagttggcactccctcctccaccaaccctcagctaaaaggttcagtggaagggactgatgctgtctccagatgcagactggggccatggattgagccacagagggaggagggaggagggtctcaaattaaaaagacaagaaacaaacaatctccccaaataagcagaaagtctgagcgtggaactgagctggttggagctggggagsgggtgcgggaggtactttcagcactccctcgtgagatcatggaacagggcaggaaatctgaacctgctgccaaagaaaactcgctttgccttttgtaaaaagcctgtcgagctttcttcacaagggagctgctggtggggactcacaaatgggcatgctgcctgccagcaagggtctcctggccagccctaaaggcccgggctgctctgcttacagccacacggctgtttctragctgaggatgaccctccaggtggctgagattccctccaatcttttwatttctggttgggaaaccctacacagaccagtgtctgtctcacggtttaaaaggctgcatgcaaaacatttcctcccctggtagaaatgctgcattgagccacagccctccctctgcagcctgtgcagtgtcaaggggacagtggctgcatgatgatgtgcctagcagggtgtcccccatcaggacagtcacaggggtggaacaaatgcaggagccatggagccaaactgaactgggttggaatcccagtttcagccacttaatagttacatggatattgscaagtagcctgagttctcagaggcttgatatcctcatctgtaaggtgggaagtataagacctacctcacggtgtcagtgttaaataagacagggcaaaatgatgaaggtactctgtaaatgtatgtccattccttcctcctcctctgggttccttttcagcacttcctcaccacagcaccattcttaagttttctagccycatttattttagaaggggaactggaggcagcttggagggaggtaacatctggatgtcgcagtgacagctggtggctggtgaggagtccacaggtcaggggcaacgggccctgcagacttctcagcatcccctgctcagaaggggctctcagagtccatgggctcagcaggctgattcttcccctctcctatgagaccatcctccatgtgggtcccatccaggaagctgcttccctcccaagggaaggaagccaccagtgtttctagaatctacatcagtgccactcaaagcgtggtctcctgaccactagcatccacaccagctggggcctggtcagaaaaacaaccgtgggctcctccccagacctattgagtcaaactctgggggtagtcccagcagtctgtgttttagcaagcctccatgactcgaatgtgtgccacagttggagagccactgtgctacgggcaggttatcccagagcaaaggaaggaaaacctcctctgcacaatgcactctgaaggccccactgaatacgggcatctgtgaggcagcatgggacctgatcactctaccatatatagctgttgtgtgaccttggaaagttccctcaccctctctgggtctctgtgtcctcatctgcaaaatggaacaatcataatactggattgaggatgagaagcatcaatctgttcatcctagcaaaatgtttagcaaaatgccacgtgttcagagctcaggacaggttagctccatcctgttaatgttgaggcagcccacccaggttaagggtctcattctgagagtggctttggacagcttgagaatctacaactgtaggtgacagagcaaagaaaactcttgaaaagtttctcttagagcctaatagcaataaccattaccatggtggcagccaccagagtaactcattatatcattccagcaacgctgtgggttaggagttactatctgtatttttacagggaggtacttaaggcaccacttgataagtggtagagccaagtcagtttgaaaaaaacataatcattgtgcaatgacaatttgagacattttcagggtcccagttccatcccctaggaatctgtaaagaggagagtggcttcaacctgctgttcagggcctctgccctcattccctggaggctggtttggacagtgtgagaggcatccttcccaaagcagacaaagagaaaacacatgggaatggtaattaaatgagtccatgtttaaggggcacttaagtggattaaaatcaatatgtagtcacataagtctgctaagccatccttaatgtttggcgggtggatttctttgtttaaaaaatcctggtttgcttgaaactggctgccccattgaagcatgagataggacgagagattcccaggacctggaagaccacttgctcagagtctgaaatgtttacactgcctctgactggcatctctataccagaaaggagaagagggggactagatgtttttgtgtgrtagtctctttcctgctatcttaggctgagttccctaaaacaaaatcctgagatgagacatcatgtaaaaataatttgttaggaagtgttctcaggggaatgggaagtagagcttcaaagggaaggaggccaaacaaggatgtgatatcmagcaaagtccccaggagacagaaagaaggtgggtgactttggcaccgtctaaagtataggtcacatctcactgtcccaatcagggacaaaagagcatggctgaggattcccccaaggggatgtgaattctcaagcacttccatctctccatgttcatgcaaagaaggtgccaggagccccgtggccatcctcccacaaaagacacacaggtggtggcatctggggggtcaatgtgcatggttgtgcatggtagagacccctggatggagctccatgatgtgggatttacatcccgcccatactctgctgtgagagagatggtatgcagccagtccagccatctgaagcagaacgraaaaatggtatggaaagcaaggcacctgaaaaaattttcaaagggagaaaaagaatgagcaaaactatcctgtagaggagagagacattgmaaatgacatatacagacacagaaaaggttgctcagtcaacaacttctgcaggctcaaagcatgggaagtaatcagtaaatggccaatttatctctccctcacagccaagccaactcctaacataattggaagtttaatatattccaacaagttcagracaagcatactagatcttaaggcaatctcatggccctgcagctcatcctttttttcaaagaaattaattttcaaaaaatgactctattgagattgaatttagatcttatccattgccataaccaaaagcaacccttactatttgtgtgtgcaagtcgttttaaacagctggcccattaactgaaaaatgtcaaaaacaaatataggagaaaagtaagataatcttggaaggcaaagcctgtctccctatattgttcttaaaaatacaaaagggacacataacttcatcatttaattatattaggaggtccgtcattcagtgctcttgtaaaactgtcttgcccttgttctaattgcgtattgatcaccgaggttcttggcatcgggcttttctttgatgtgtgcatgatcagaacacactaagakacagcctgtgtgctccttcctgtcctcgtgggcatttcctaaagcttcagccctaagctggtatatgtttctctgttacatcaactgccaaggcaattactttacatctgatatttaatggaaaagcttctgaggacagggctatactcacatacctccacacctggcacagtagatgagctcactatctgttgaataagttcgtgacagarcagaagttctactgcagccacaaaggcctattcacagtctttaagcctgatgaagttctgaataagtaaacccttagctacatcaggcagtttatgaatggtgttttttgttactgtcatttgtaatagcttttgacctatgtgtttgtattagtccgttttcacactgctataacgaactacccgagactgggcaatttatgaagaaagaggtttaactgattgacagttccacaggcttcacaggaagcacgactaggaggcctcaggaaacttacaatcacggcagaaggtgaacggaagcaagaaccttcttcacatggtggcaggagagaagggggctggtgggggagtgccacacacttttaaaccttcagatctcatgagaactcactcactatcacaagaacaataaggggaaaatccacctccatgatccagtcaccttccaccagatccctccttaaattcaacatgagatttgggtagggacacaaatccagaccatatcagtgtgcaaatgatgagctaattttcccactaaagtaagcactggtatggtacatagtatgactatggtagtccagtattggattccataatttaaataactagtagactttttagttagttgaaaggtaaaacaatggtaataacaatgagctgtaaaatacgacctgtggggtgggaatggggacagccaatgcttctctggtaaagggaggccagtttcagcccctggtgcaacagcacccccatgcattcatcatgtgagatgataagtgtctttccttgaaccagttcttcttcttcctcctaggctgggaacttctccttggagacagcaggaactgtgttacaaaggcatatggcccaacaaaggacactgaggctactcagtaattattaaatgagagcatgaacaaaggaatgtaagatgtaacagaaaacatacgtgtctcacacatgagaattattgtgtagaagctgtttcccatttgagacaaaataagaaacacttgttgaacgagtagatgggcttcctctgggagcacagcaggtaggcacccatgttggagccagccatggtctgcagagttcatttctctgagtccctgccccagaggcacatgacataggaggctccagacaactgactyaaagacagagaggaccataataccagggttcctcagtcctcaccagcataagaatcccagagaaggcattttttttctyacatactctaggtctcaatctcttaacttyaaaaatggcagtggctacattagctcttgggaccagtgtttcaaaggctagtgtagaacacttgcctcagatgattcaagatccaggtttcctgactctgcttctgctgtaaagaatcccactctggaggctggggcctgcaatctgcatctttaacaagcccaccagagaatttcaatgcagtttcacttttgagggtttttaacttgattgtccatcagaaccacctggggagctttcagcaaatgcatgccgacgccacatgcattrattctgcggccacacagaggggcctgcatctgggtcttttttacaaagcttttcataggattgtcatcgtcacctttccagcactgttatgcaaattggagagactcatgccaaggtgaagggcttggtgagagcagccaggtcttctatgcagtgatcagcctgcacagctgggygtggcatctctggctcccaggtggttccagtgcacacccccagttaagaaccaatgaagaatgttgcttgttaacaacctttgaaggctttttagcaaaaacaaagtgtcatattgggattcatctgtggcagtttgcagaacatatcaggggagagagstgtgtgcaaggcatccaccaggaggccgttttgtgctggtctaggtaagaggagattggagctgacctgttgaagcaacaaagagaaagggaggaaggatcatcctagaagtggataccagttctttaagaagagtcctgagatgtacccaggagtagcaaagtggatgtgccaacccgagggaagagattagtaagctgctgccccctgagacagggctccatgagctgacaggttgatctgtggagatacactctgaaggtgctagactaggaagaggtcctctcaggccccatcccttcatcttcagccaaaggaagttcagcagtagctgcccctggcctctgttctcagtccacagctccaccagcccagttgcttgtgcagagggagaggatgtgggagagatgctgtcaacaccctccatgtcccctccacccaccctggaggccgcctatgacagttcgccataggcgaactgtttctctggttaggaactttctctggctacaggagtgtgctgcacccgagtcaggagggctggaagtgcaggatagttaacgtccccagtacagttttctaccaaggagagaccggtgagatggatagatgccccagctktctcacccgttgatgacacacttcactaccctctcctggagctccctgagatcactgcccatacaaactaattgcaccccaatgcttgtcccaaagtctgctcagataagggccgtgtgaatagacaggtcttcagttccagaaaagtgtatactcacacaggaaatatctctcaaataacatgggcagtgtatatgttatttttctggagggcagagggcatcatgaggaaggtggtcttcgtggggtgaatatcatgtttcctccagggagggctcagtgacatggagcagtgcttctcaaatgtccatgttcrcagaggttagcttctaactcatcaggtctagggtggggcctgagaatctgcatttctaacagtgagcatgtccagggaccacactttgagtagcaagaccttsacagcttcaagttgcaaaccagttttgaatgagcagagtagaagggggtttgyaggtgagaaggaactcttcaccatgagtacatttctatgaagatttctggccaggattttagtaagtacctgagccccttcaaacatttgactccygcataaccttttcatccaaacaccattcatgagttgtttttatgccatgaggttaaattctttcctatcatttcaggggaggtccccacttgttgagttttccgtcagcctataaggcaaaggaaaagagtgatagaaaataaaaataacttgattcattagatggaattcaacttgaattcttagtttgttgactaagaatttgcagcctccgaggaaattttttttaattgaagaaaaactaatttttaaaaatctgaaaataattcgtttgtgactatttaacagaaggaaaaacttcctgagtgagcatcaaatactttaattacttcttaggcttcagaagggatggcttgctagtctttgtactttgggctttctgttacgactggttgacttagatttatttgtttatttagcttcttaatttcatatcctgtggtcctgaagaggacaatcaccaggatttaggggagtgtttttgtctttattcactttggaaaaatgtaaagattagtcctaagcagggttgattcaccgcactacagagggacacgttaggaacgagacagcttattcaagtgcttttgaatttgtattggttttttaaaatgtaagattatttttacttattttaaatctttcaaagcacttttttcctcagggccaagtggactctttgggaggagacctcgccgtctccatttgatcacataattgcttctgatgccagccagtctgcaactgccagtgattggcacagggttatttcatgtgcacttcaatcaaatttcttttcttgcctttttttttttttttttttttttttaagaaaaaatctcactgtggcacccaggctggagtgcagtggtgcaatcatatctcactgcaaccttcaattcctgggcctgtgatcttcccacctcaactcccaagtagctgggaccacaggtgtgtgccaccacctctggctaatttttatttttgttgagacagggtcttactatgttgtctaggctggccttgaactcctggcctcaagtgaacctcctgccttggcctcccaaaatgccgggattacaggtgtgagccatccatacctggcctccaaatttcactacctaacttgggagaggaattttgcattagcagttacatggttcatctgcctcaaacatttgttttgactctagcttttgcttgtttcacttttttaagcttggaaagaacaaacttagaatagtgtaggccttggcttccacatggatgttttgacaaaatttcaaggaagcaactggctttgtagtgctttctttgtcctgcttctccaaattccccaagtgcatgggtaatcacctctggttccctcggagtgttcgtggccagctccttcccagccttgccagcccattgtctgcatttggcatctgcgctggagtcactgtgtgctccagttccttaaggatacttttagtttatctgatctgtgctccacacctcttcagactccatttccatgaatgttttgggagaggtgaggaagaaaccttttctgctcattgttgcgcgttccccaccccaggccccgtctgatctattcttacatcacaactaaaaatattcttaaaaatgtgaatcagatggtatgactcccctgctcagaaccctccaktgccttccctctgtacttggaaccaagtccaaactcctgatgagcagcagggctccgcatggcctggcctttcatctgttgcttcccaaacgtgtggcctctggttggtttctggaactcaccatgcctttccccacacatgctggttcttctgccagggacactcttcactctcccttcatgtgcttagccccttcttagcttgcaggtctcagctaaatggtacctcctcaaaagggccttccctccacctataccaggtataatgctgtttgcctccttcagaatgcctctcacaggctgtgattactttaaacagattcgttgagatatagttcagatgccatgcaattaacccttttaatgtatacaattcagtgggtttgagtatattttcagagttgtgcatctattgccagagtcaattttagaacatttcattacctcaaaaagaaccaccatacttcttagctgtcgtaccccttcccctatttccaccagccaaaggcaaccagaaatctactttctttctctctagatttgcctattctggacattgtgtataagtggaatcatttatatgaaatggagccagtcctttgtgactggcttctgtcacttagcgtaatgttttcagagttcatttgtttgtggcatatgtcatacttcattctttttcatggctgaataatattccattgtatggatataccacattgtgtttattcattcatcagttgctggacattagattgtttccagtttttggctattacaaattatgctgctatcaatatttgtgtacacatttttgtgtgggctcatgtttttatttctcttgggtacatacctaagagtgggattgctgggttacatggtaacttatatttcactgttaagaaactgccaggctgcttttcaaagccactatactattttacattcccatcagtagtatgtaatggttccagtttgtccacatctagtccagcatttgttattgtttgtctttttgattgtagccattctaatgagtaggaagtagcatctytttgtggttttgatttagatttccctgaaggttaatgatgttgagcatcttttcatgtgattattggccatctgtatgtattttttggaaaaactattcagatcctttacccatttgatagttaggttacttatctttttattattgagctgcaagactttttaaaaatgtatcctaaagttcctattagacatatgatttaaaatattctcatcctgtggattttttcactttcttaatggtgtcctttgaaacacatgagttttaaattttgatgatatccagattatccagttttttttgctacttttgtaattattattattatttttattattattatttgaggcagagtctcgatgtgtcacccaggatgaaatgcagtagtgcgatctcggctcactgcaatctccgcctgctgggttcaattgatccttccacctcagcctcccaagtagctggggctacagatgtgtgctactacaactgggctaatttttgtgtttttagtagagacagggttttgttatgttggccaggctggtcacaaactcctggccccaagtgatccacctgccttggcctcccaaggtgctgggattacaggcatgagacactgtgccctgccagttatttttcatttccttttgaattttttgtttttgccatctccccgtgtaggctgcatgtgctgcgacggcagcgctgtgtttgccattgtagccccatcccctagaacagggcgtgatatagggcagcggtcagtgaatagctcttcagtgagttagtaaacaaagtggttctcaaaatgtaaaattcttccttgactcactaagcaaccttctgattgcaactgctttccctttttggsctccaagacaggaattctctggccctgctgacaggagccccatgttgcacagggcaactatgtcactcattggaaattaacatgtctgccctctgacttcagtatttctcccaggagcagaggatggaagttcttcacagctggatctgctgtatcattcagaagctggcttcagagcctgtgtagctggaagcctcgggctcacatcaaggaagggaatgccactcagcctctgggcacacagctgcaacttcccctggtgctgtctctcttggtgctaccctatactagccttgtccygaaacatctaccccattcatttcaccctctctgctactatgtcactgcctctcccatcacagtattccacccaaatgaggcaaattcttatcctttcaagacctaccctagagtcaccttttttgatatatttgcttttttatttactccaccaggcaaagagggtggcaccctgctatgagctcttggaacaatttatttataagttccttatagcctggatcgtattcaaccaatagtttttccccctctattaaaatgcgttaatttggagtctttgcttactaaatgctgtctcctttttttttgagacagagtttcgctcttgttgcccagcctagagtgcaatggtgcaaactcggcttactgcaacctctgcctcctgggtccaagcgattctcctgcctcagcctcccaagtagctgggattacaggcatctgcccaccacgcccagctaattttttgtatttttattagagacggagtttcaccatgttggccaggctggtctcaaacrcctgacctcaggtgatccacccacctcagcctcccaaattgctgggattacagtcgtgagccactgagcccggtcaaaatcccttcttacctgtcatttgtrttctccccattctgtgtctgacatcttgtaggtgtttgttagatgattggtgagtgaattaatgaatgtacagatggatgatgtataagtcctttcagagggaaactttgagtatgttaagaccccaggaaggcttatacttgatctttgtatccagaatgttgccaacattctggatacaaagaaaagcaccctctctgtgacttctcagatcccatctgcctctgatctttcatgacccctgctggattgactacatgagcctctttcagaagtttgactagcaaatcaacaaaacagttcaccctctgcatctctgctcagggatcaacaggagtgcttgcttatgtggcttcattccagtgggaggttcatattttcttagttatgtatcatgtagtcttccttgattcaagagtaccatgacttgtgtttgttctgactccaggactatccatgagtaaccctcagccaagagtgtatcatcagggcctgagcaagtggcaggagacaaggtatagtgtgaatctagtacatggaagagaatgtcttgacagctggggtctgtaattcatatgctgttcaaatgacaggccttttccccacacctgtgtgtattcaaagcaccatgtcatgttctgtagggagataggcaggggagttgggtcaggagaaggaagttaagattgaaggagaacatgcagaggagctttgggaaggaatgtgcccggctcacatcctggctccatcatttaccaactgggaaaccctgggcaagtgatataacttcacattccagtttcctcctcataaaaatggaaataaagagaaggtgtacatagagtttttagataatggatttaaaacactrcctggcacacagtaaaccattactaagtagaggctatgtactccatcctacacgcatcagcagtggcagtccagcaatactcctataaggcacatgttatgacttcattttactggtaaggaactggaggcttagagaaaggatggttaatttgcctgacaacacattgctggtatatatctgagccaataatcaaaattgggacactaatgccaaaggttttacaatttctatgctgcaggctcaggtgtttttcttcatgggtaggaactttatggctcaagcccgaaggattcccctctgggaatacgactgttctggtaaggttcaagctgactcatcattgagtgctgctaataaagtgtttgctgagaatgttttctgttaactcattgagccaggttattaagaacctgtgctcacctctgacacctcagttgattggggaatttgggatgaagtgcttccaaaatttatttgaattctaaattaactaagtgagttaacgtggaagccgcttttaccagcccacaagggtcacgcttgttgtgtctggaagaaggaaagggtcttagaggaacacaaattgccagactgacagtcagatatggagacaccagggtcatcttcagtttaacaaacacatgtcagaactagaaagttggaagtgagacttcaaactctacctagcattgagcataagcaggtcactgaccacaaagatattctgttcccaaagagcaccatattcgtggtcaagtaaggccagagtctagactgrcatcaaatgcttgtatgattgggaggaaggagcccgaaggccaaagaggctcactaatttcattattcgattcttccaaccactgcacgttacaaacagggctgtagcctgggtctactggccaagcttccggggctgggacaggcaaggtatgtctggatgagagaagktctttsccaagacaagcatctcttgtgccaggcagaccagcaaatgagctgcttcttgcagccccttctttggcatctcccataagccaaggcctattcatttaataaatgcagactcaggagctactaagtgccaggctcggtgccagacactgagaatacggaaatgagtacgcataaatcaagtgtgcttttcatcactgtgtttttaaaaatgttaactgatgatttcctgatcctgagagtaatgtgcagatgctccttgaactatgttggggttatgtcctgataaacccatagttagttgaaaatatcataagttgaaaatgcatttaatacactcagcctacsaaacatcatagcttagcctagcctacttaaacatgcttagaacagttccattaacctacagttgggcagaatcatctggcaacacagccctccatagagtatcgattgtttaccctggtgatgatgtggctgacgaggtgctacagctcgctgcgctggccagcatcttgagagtattgtacagctttctaccactttccactgratacctattgtttttacaccatcagaaagttgaaaaatcttaagtagaaccatcataagtcagggactatctgtatggtagtagaaatttttaaytgaatcttctgtaatcttcagcaagaaaccctgagaatattgaacgtctttgccagacaaggaaaagtgggactggggaaaaggccagttatgtgaatcctcttaaaatagggtctaaaattttataataaaaatgtattttaaaagttttgattgagactttgcctgaaatgtgaaactgaaaattacgaaattaggtttattttatcctgcatttattcagtggcactcaaaacattgtaattataattgtcaaagatatcttagaccaaaggcaaaagattatttgctttattagagtctttaaaataacagtgccctaacttctgaaacaaaagaaggaattgagtgctggataggcagcttttgaatgtgaattttcctactatttcataagataacatcctttgcttcatattttgtctggttttcggtacaatcacaaaaggatcattttaacaatggtcacttttttctaagggcttctcttgatcttttttatttaaatctttgtcttctgaagcatcttaaagtagtatccaggagaattttgactccttcaacagttaactgatctaactctgccagatccagatttatcagtggttttgcagtggttttatccatttttcaacatcactttcattgatttcatgaaagtctgcatcttttagagcaagatttctgcttcactctgtatttgatttgcattgtattgtagtcagataatcagatgtctgcactagcagtcagggacattagatagacagtttgctcactggtccgcgttcccagtcagctaagagtctcataaccatcagccttgataaatgctaatgttaagttctctaagttaaagccagtgtaggcaatgattggaacttggaagcaatcagagcacagaagaagcctggtccctggaatctctcccatatgcatcctggtggataccaagtgcctggcagaagtcataggcaactcccaaccagagcgctctccactgacatgttgcttagagctggggacagcttagattagccatatctccccaaaatttgtatttttaattgaattgattttttaaattgaatccattttaaacatgggattttatttttatttaaagaattaccttgtgggtatgtctgtgactcttgggtgcctgcctggctgccaagaagacatgtggctccatgatgactctgctttttaaggttatgccctgggcatgatctgaaaccaggagaacaaagtgggtactggtgttgccttgaatgaagtgctcccctaatgggggaagccttgcaacctttataaactgcagtcaggactgttttctcttccttagtatggatttaaacaagaatcataaacacgtgagctttctcctcatcctccttttgttgcctctccccacctgggagcaaatgcctaggactttccaagtggttctcggtgccagcagcctcataagggaagagtattatctgagttcaggttcatcagaagcagcacccgagatggactctcatgaaggggatttattggggcaagaggagcgaagggagcagaatgaggaggggaagaaaccaaacaggcatgtgggctcagctggagtctgcttcacccagtcctatgggagctctggaacattaattgtacaacagagttggtcttgtcttgaggcaaaggggacatccttgggtacccacatcaatcagaggctacggaatgcttttggggaaggtgtcataacctcccaggcaaagcgactccattcaagctgttgtacttatctagtaaggggttctgagtggagcaccaccagcatccacacaaggagtggtactgcttgccaaagcccatgctctgatacacctctgggcctccttggaaatcacagtagtagaagagaggggtatagaattaaaaacatttggtcagggcagttgacatggccagtataaacagctatgttggtgctgacaggcagcagaagggtaatccatgacatcccttcctgtaacaccatcccggagcacatgagtcatgaaccataagctcagctctcttgttcctagagatgatgtctttggtttactcttttggcctgtcctcaccaagatccaaccagaattttgaaatttttatttgactgagtaaggtggaagagagaccagaaatagttaaataaatgctgatataaatgttacgttctagcatttgggaattaacaaaaataaggtagctgagcagcttttgaatgatcaaaagtactgttgtcttaggtcaaagctaattaaactgaggtttcctcgagttccagagtacatttttgaagacatttatttcacacatgcaaaaactgaagaagtctttggggcaataaatctttttgatttcttttttttttttttttttttttgagacagagtcttgctctgtcaccaggctggagtgcagtggtgcgatctcggctcactgcaacctccacctcccaggttcaagtgattctcctgccgcagccttctgagtagctgggactacaggcatgcaccaccacacccagctaatttttatatttgtagtagaaacagggtttcaccatgttggccaggatggtctcaatttcttgacctcgtgaaccgcctgcctcggcctcccagagtgctgggattacaggcatgagccacagcgcccagccaataaatctttacttcaagaacagacctttgacttaaaattaaagcttctctcctggtttgaaaggaattcccagtgaggtattgggcattacaagagaaactggraacagagttaggtaagcatgtaatatatgtatatgtgtatgtgtgagatacacacacacacatacacttatatatatttgcttatcctgggacactcttgagactaattataccagaatgacagaaatgaaccaggaccgtccccaggaaaccaagagaactaaagtcatccaagactttggcttgctgcctctgatgtccacaggccaattagccaggatttagggtagtgtctacttgggacagttgtgggtgttgcttctggcaggaggaatatgaggaagaagatggtagggaaaggccatctatggtgaatcattaatgccatgcagttcttgagacagcatttgagaaattattctctggttttccttattgaaattgccaatgcctgttctctaggttctaagagcagccctcacacttgccatcacacagctatgtaaacacctatgtctctgctgggaggtccccacctcttctgaactctgagctctacgaggacagcgattaacatctctcagatatgttctctcagtgctgaaatgtggtgtgtgatacgacaactcagctacccagtgcatgctcagggcgcgttctgaatcctgtgccatttgcatgttacatacatgagcttgccatccatgagtgtttggggacaagacagaggaagaaaaccttgggggaagggctaaggaaaggtgctccttgacagtgaggacaacttaaacagaggtgtgaacataagagcaggcagggtgtgtgtagaatagtagcatatacgtgccacggggcaggggtggaagaaccacaacagaacaggatgggccaaaatggaagctgggatcttaagatttgagactttattctgtttgcagtggggacagacatattttaagaagcttcctctggcagccagccaaatggactgaaggggaaggaaagctcatagcagcagctaccaaacatcattatccggcagaatcactaattttatcactcaataattttatgtattaaaaatgctcatcccagaccctgcagtctctgtgtctactcagaaaagactcatgctgtgcaattagagtgtggcccaggaatctgcattttatttatttatttattttttagacggagtctcgcactctcgcccaggctggagtgcagtggcaccatctctgctcactgcaagctccgcctcccgggttcacgccattctcctgcctcaaccttaaagaggctcccaaggtgatactaacgctggcgatcctgggtctctgtgtgaataacactggctaagagcacagagagatgttagaaaactaatcatcattgagatcagttatatccgagactggatgctgaaaagatatattagagtttagttttatatttatatatctcttatcttttgtttaattgtatttgggcttttaggggttttgtttcattgctattttctaagtaagagtgtattgatgtttaacaaacaaacaaaaatatacaagttattaagttcccagctcaatgaactttcacaaaatgatcaaacctgtgtaacctgcactcagaactgccttccacttattccataattactgtcttgatttctagccccatagattatttaccttttatcacctttatttttggtgcatttgataatgttcataatatattagaataataagatatgtataattggataatttaagtagatatattatggtaaatgctcacatgtttttaccagttggacacaaaataaaaatrtttttcatccacctgtctagatgccttgaaatgttagtctgagctgagatgtgagtcytggaaattggaggacctctgtaccttctcttccaaaatctgtaaayatactgtttccgcttggcagtcttgatttgctttcagtgactctgaraagccctgtggtttgtgaagagcctcttggctttcctttgaccttggttggaagccatgtgcccaggtggaaagacagcagttccctacagcctttctcttctgtttctctcaagtcgctgtgtgcagagtccagcctaagctggctacacttggaaacctctcctcacccttgtaccctccccacaccctggggagacttgctggtggacagcccagccctcactgcttcaggctttaggaagaaaccctctcttttcttggtgtgattttcttagagtttgtctttcctgaaccaccaagatctgaaaaggcaggattagggtgtgggcttaggagaaaggggccaagaagatgacagggttgccttttcatccaaaccttaggaggtctccagctcagccatggcccagcccacctcaccaggactgccctagggtttgaacccaaagcattagttaggaatgaagagtggttttgtcctcttacctgtcttcccagggaacccatgaaaaagtgggcagctggaagggggctggagacggcctggtcagggcatctcgtcccactggtgcctaccgtctgagcactgctctgaaggactcgatygccccgtrgagcctgctcccacacacctgccttttgtgcagcyggcccatctgttggtgctttttytttcaggaggagatgggcatctcctgtgagctgctggaatcggacttcctcaaatgcagcgtgggatttcctttcatgaggtcaaagtcaaaggtaagggacacagaygggacccttcctcagcagcaggyccccagcccttccaccagccactgattccgccrcctccctgaggtgaggagtcctcccaccccctgcytcccatagcagctggggcggccactgaagccctgacatgctcctgtccctggctgtgtacaccggggtatactccggaggggctgcatcatatggtctttctcttcgattcacatgatgtaccccaaatgtgaaagtgaaggacacaccacagcctctgcactttagcacgtgccatttagttgaccttcctaaaataattttttttctgagacattctgtgcctctttgagtcccctagacaacacagaagaagatgtggtctgtcacctatagtcctgtcattcccttgggtgctcacagttttctgaagagaactctcaaaattctcaaaacataaatacctgtatcccacttcatttttaagaagagtaaagaaattaagtcmctttggtattggtatggagacagattttytaagttcaaatagtatactacagcatcttcagacattcatggaacattgtagtatgtgccatcattataaggagatacaaacataggtaaaaagatgtggtgattggaggcaaaactagaatctaaaagaccaagtctgcctttggaaatggaagctattttccctgccatgaacagagtgagactccgtctcacaaaaaaaaaaaaaaaaaaaaaaaaaaaagtgaaagcttcatccttttctcctgcctgggtcatacactcagatcattttaatctccaaggctctttggtcccagtatctagtagctatttgtaaaccaatggtgagaatattctggtgagggagaagacttggtcatttcttagcaaatcacttgaacccataagccccattgaatgcacctcgatcttggactttccagccttcagaactgtgagaaataaatgtttaaaccacccaagctagggtaatttgtgatagaatcccaaactgactagggcaaaaaggtaataactttctcactgttagggtcaatgttgttcagtgctgtgttcacatatcacccaagataatctcatgaaccacctaaaataatcttagtgtaccactcccagtgtgaacatmctgtgatttgggtaacactgccccaaacaaatggtgttcaccatatacatatcaggcacgtgtgggaatgtgggaggaacccctgggtaggggttataggaccaggctctaccacaaactgtgtgatcttggcgaaaccacagtggccaagtggccaagtggcccatgactcctcggatttttttctgcctctcttcctcattctgtccacattcaccccaggaggagggaaacctcaataagtgtctgcccttggaaaatggattacatgtggatggcagagtacaggccaagtcccattagactccaggtagggtgagggtggagataaaggaggacgaccacaatccatggacactattgcctatagtaatgtatgtggcacatctgcacacaaatttaattaaaatcttttgagtaacagataataggcttaactggaaaacttgcaacagtttccatttcattttaaactccagcctatatcacatatcagacctaagatgtgtctttctctctctagtggagtgttamattttgtcaaatttttgtttgtttgagagggagtctctctctgtcgcccaggctggagtgcagtggcgcaatcttggctcactgcaacctccgcctcccaggttcaagggattctcctgcctcagcctccctggtagctgggattacaggtgcccaccaccatgcccagctaattttttgtgtgtttttagtagagacaggtttcactgtgttggccaggctggtcttgaactcctgacctcaagtgatctgcccacctaggtctcccaaagtgctgggattacaggcgtgagccaccgtgcccagccaacatttattagatagagcccacagaagtatgaacattggaatgttggttgttttcccagctggtaatgctaccactttcctcccacatacagatgctgggacctgaagcaagactgactaaacctggggattggggggcatgggagcagagggtgattccctggagaaagcccaacaagtcacccagcagagacggggctccccgtatccgcagcccagcgtgcactcccatgtccttccaaccctgagggtcctcaggctccaggccacatgctaagcctcatggctatactttggcttaccttggatggccatgtatttctctctctcacagcctgcccagtttctgacattctgttcttccaggcctccatccctgattttggcttctcacccaattcttttgcctgtcatctcactgtgctctttaatgtttttaatttaattcagatctcctcccagtgctgactctacaccagtcaagaccctgcctctctcttccttcttgtcctcttcccgccctgtctccatgcctgccccccaccccacwgtaagctgaccagtcccacagcaacagaaatttctgtctagaaagagatgtccatgttcactgtagatgatggtccattgtaatggaccaatgtccgttgctttcaggaaacattcagtagaattcagtgttgcaaatattagaccattgcctagaattcaccataatggaacccaaaggtttagacattgtataagttataggctctcaaaatttgatgaaatttaagaaccgttttgtccaacctcctttttttattgaaatgcaaagacagtatcttagccaagatcacagtcagtttgtggtggaacctggtcctgtgacccctacccaagggttcctcccacattctcacacatgcctgacatgtatatggtgaacaccatttacttagggcagtgccccctactcacaggatgttcaccactaagtggtacactagataattttagatggttcatgaaattatcgtgggtgatacgtggacgcagcactgaacaacattgaccctaacagtgacccttttcaccttagycagttcagtcatctataacaaattaccctgggctgggtggtttaaacaacagacatgtatttctcacagttcttaaggctgagaagttcaaggtcawggtcccggcagattcagttcctggcgagagttctcttcctggttcataaacagaaccttctctatgtgtgcccatctggctttcccttggtgtgtgtgcatggagagagagagatctctttgtcttctcttcttctgagtgcactaattccatcatgaaggcctcaccctcatctaaacctaagtaccttccaaagaccccatctccacataccatcacataggggggttaggccttccacatattaatttgaggagtggcggggggacacaaacattcagcgcataagacttttcaatagtcttccaatcctagccacactcaggagaacgtctccaatcctgctagcacatctttaacacttctctatcaccagcaaatctcccttttcaacaaagatggagtagaccttaggctcagaggcttccaaaggcaacagagttcagcattgctctgtktwcaktgtgttcatttttacaactaccttctctttttggcaagtgatcctggattcccatctatgwcagtgatataaattgttcttttaaaacaatctttaaactaaaagagtaaggcaacaaaaatatgaacaaatatcccaggtgatgtaatttgcagatgtggcagaaattgaaaagatggtatgtgagtgaaacttagaaagtcccggttaaagagtgtaaacgcatcacttcctaaggagagcctcggtggcggaacaggagcagcaggtctctggccagagtatgtgtcaggcttggttttactgttaaagctgtgactttggcctgacagtcagaaagctatacataaaactaaagcttatcatgcaaatgagcttccagaggtcataaactgcagaagatggaagagaacagtttaagtttggaatgcctgctgatgccaaataccacttcctttttcactagtatgaattcagcgtgatctttgatacaagccacctgtctggggaagaggaagttctcagcttcattgttactgctcagaggtaaggsgggggtttaaacacttttttcaaagatgagagatttatgggaccaggaaaggatrtgtcctggttaagctttgatgaatcccaggatgctgaggaggaagaaatggttactcagtgataaagccttgagccgcwaagtggaattggatttcttggggatggtggttgcctagtgctgcttgcatagccgccactgcagattgaactgagaggaactgggcatcagccactcagaggtgatgattctacagctgaggagagacaggcccaggggggtgaggctctagtccaaggtcagttcccacttggctgtgtatttcccagatcagacagatgtcctctgcaaattgtctggctgggcccactgctgcttttggacatggtgctgtatcccttgatggagtgggcaggtcacctgcagcctgagggcctggctgagcctgttggcagaggccccaagagatgctactcaagagagggcttaatttggaagccaagtggatggataggaaaggggatcgtggggtggcagcttctcccctcagtagcatgtgcccgcccctctccaggatagccatgagtgcctgtgggggcttctggggagttacaagatgccttctccagggcagatccagcatgccttgaagcagcatctaggtagcacttggctggcagctccagtggagggaggggcgttcaggtgggtgaacagggagacacaagctttgattggggtggtggttggacacccaaggcaaccttttcattttcacttggaaatgatcttaaacttaacagaagtcttacaagaatagtgcaaggaactcctatataccctttacccagattcacccagtgttaacattttgcctcatctattttatcatcctctttctatataattttttttgttaaccatgtgaaagttgcagaaatcatgcctcttgattcataaatacttcagtgtgcattcccaagaatgaggctgttctcttaataaactgtagtatagttatcacattcaggaaattgaacattgacactatgctattagctaatccgcagtttatgttctgattatgccagttatcccaataatgtctttttagccgcttctttttactggtccacaagacttggttattttctattgacactattttcragatcacataatttacatcacataaaacatgactgtgatytaatagaagcctatgcaaagcatagatagggtagacttcattcccattgcacaaaatccagaagggcttcagtggggaggtagcatttaaacagaggagtctgttttcaggctgaagcaacatgggcacggcagtgaggctgtccatggggcaagaagccctgttacacctgtgtaggtggtgggcacgagagtgtactggggattcgtgcaccttctcagaagaaggatggggagcacacaagcacagtgggaatggggctgaaagaggagcctgggcgctaaaccatgggggacaaaggtcacctagaaaatctgaactatatcctgatggcactgaggagccactgaaagtttttgaaaaggggagtggcacagtgcaacagcttggccccagagcatgaggttgatgaatttgataaggggcggcagatgcccattcaaacctgaaaattctcattctcttgccatttcttggatccacagaacactcgccattgttgggcagacccatcaatgtgctctcttggtccttccacacctgaggcagcctgtatgcctgggaaggaatgtgacatggaagagatttcccttgtcaaaatagaagacacttcctgcctccacctaattcagggctaatcataacagtcagagagggcagggaaccagtattgcaattgtgaaaggttcatttgttagaataacatgtccacacagcagcagtgctctggttttggatgcatattagaatcgcctggggagctttcaaaaatatcgatgcctgatctatccccagagaccctgaccctgcctctgcctggggtgagacctgggcaatggagttttcagaagggctcaccaaatgattctaatgagcagccaaggctaagaaccactatttataatcccttactctgtgctgggcacattttcactcagtaaatatttattgtgcaccttatatttaccagttgcagtgctaaatgctgggcacatgagaaaatgacagtaacctactaaattcaagaacaccccctatgtacattaacagtgctgcatagcttcaggaagcmctaggatctgtagcttcaataatataaaaatttctagtttcttaaatcacaaatgttaagatgaccatawtatcttctragcacacaccagaatatttcagatgctcatttcttttcaggcattggtgaagatatggtctgactgccccggagggcacccacacacagcgcttgactccctgctatgacggaaagatccttaaagctccttatcttgaaaactacagttaaaatctcaattgttcctttcttccatcaccaccctttgaaggtctctttgcctacttgtagatttagggggacataacattgagactgagcagtttcttgaacctctcctctcagcagccaccagcctggcttttgcagaccactggaaagtatcccagctcattagcttttggaatgacgggaagccttttgatgtttgacgtctttatctcaactcttcaacttagctcattctggagcagtcacacgatgacagatgagacggttgggcctragccggccaaacaaayggcagggcaagacctggcaggatgctggggtgggggcgggagtgggccaggatggtgttaacccatccacaggggagtygcctttggcctgcccacagcagtgatcccaaggcttttgtcaccccttgggaaaggaaggacaaggaagtcaggctgtgtgggcacctgatcctgctgcttttgcaaactgtggatgcccctgagggactgatgtcaccccatgtaggaagacagatgaggagccagggcagagactgtggscctatggggtcagcgtcacacagcaccattgtttcagaacaataggagggagaaggagaggggatgtgagagctatttaagtgctgttgccattcagcacttgctggttgagagaggaaggcagtggggcagggcttggagggggcagagagagggcacagagcagacagggactcagcagatgttcagggaacggcgtggtggggaacagtcaggatgagctgagccagcctcagcaggtctaggggactcttttcttccgcccatgcagggtgaacttgggaaccaactgtgaatgtaggttcaagaacatgtacccaagagccacgcattttcccaaggaataatgatcacaattcctattagaaatttaataaagtaataaagggaaactaggtcttctctctcttcctcctgttccttctcctcccttcttcttttgctcctcttccttctcgctcccaaatctggcatcaggagcaggagtcacagctgagagagccctagtttgaagtctgactgagctggttggaatctcagctctggtttgcaggggggccttgggcagttacctgatttatctgacttgctccttacctgtcaaaggtgggtgctccatctccctctggggttgctctgaggtctcagtgaggccatgctgagaaatgcccggcatagtgcctggcacatagtagccacttaacagcatcaattccctcatgttcacctttccagaatgatctcacaagaatccccgttctgtgctttctcacccggaggccttatgtggatgtattttagaatcacctggggagctttcaaaaatatcgatgcctgatctacccccakagacttgctatagccagggtctatagcgagagcttccatgatgtttatagtggtaggtttggtcagggcctctttcctgggcttggctgtccatggatgatgggtggtcctttcaggtgagacatagctgctgaagtctagcaactccttcctggctgcaataccctaacttcattggtccattgttcgtggaacaggcacttacacaagtagcacacacagtaggtgccctgcccataacccctcagccctcacccttcccaatctatccgcaaactgggcagattccggctcccagcaccagccaccctgctgaggctttctctggccagagcccactcacttgcctgacaggcaggtgccagggggttcattccaccccacccccacccccagcagcagcaacagcagctctcaggagtcagtggataaaggcctggctcccatgccctcagctaggaagactgactctgcctcacagagtccccgcgagactgggccctggctgccgacagcacgaccctcctgtatggcatgcctttattgtctccyttcctttgctctctcccttctccactctccagtcctactggcatttcctggggccacctctcgaataaactacttacactcaaatctttgtgtggaacacaaccaagacaatagagtgcccttgatagatatgtacagggaccaaaaacagactgaaggcaatgaggtgccatctgcccttggagaatgtagagattcaactctaaagtggaacagagaaagcccactgctggacagctagtgttggccagcgttcattcattctcctytctctgcacagtggcaacacggagcgctctgaatccctgcatgacaacaccctcgtgctgatggtgccactgatgcacgaggtggacacgtccatcaccgggtgagtagcctggtcctgggttgccacaacacaggagtgccctccagtggaacactgtgcttctcatatttgcatgtgtagccagccaggagccaagggctgtgccacctccacttcctcccagccttgaaaagcaggatgaagctttagctgcagtaactcatacactcctccctccttgttttctcctctgtcccacctacccacccacctggtagataatctgagaagtttgatgacaagtttaagccccataatttctttgaacattccatatacctttatgtgcatatattctcatccgcccctagtccctccagaatgctgtatggtaacaagcagcatggctcctgggattaaaatctcagctggaagttgctgggccagagattatcaccagatgtgtctccagtcctggctcacaggaggaccactttctgattagctccacaggcagtgctggctttgcttgtttctgttaactccctctgcagagccagaggtggcttttcctgatgtctrtaatggtctggaatgggcagggaaccatcccatcggccacactgtctgtctgggtcaagtccacggtcattcagtgccgctggcattgttggaaagcaggaccctgggctgcagtctgtggagacctgaaacaacctgtgtcagttttcaaccaaagccccagcttggaaaaatgagaactccatttctttccagcttcagaaaacagagtgcatacctctttgatagtggaaaaaagatttacacaattagtttagatcaggtgaggacccactgaacccttgacccaaatgcaagctgaactttctggaggttcacagtttctaatttttcggttttcaagtgcttctgggtctcagccttgattagcagtagaaatgttgatcccttgcagggagagccatccctgcactagcccgcactgctgggagccagtggaatgagtctccaagcattcctgctcctgagcttttggcatttttggtcatgttttttaaacatgaggtactgatggaatatatttgcaaattagcatatttttgcctctgttcacagctctatttttaactgtatcatttatttacttgtctcatcaaaggcacagcaagaatatacccagaaccaagccctatccttggggacaaagagaaaacattctccccaccacccccagacacttgatcatgtaatcaktccttagaggaccttgttgggaggtgttaacagcccctgatgaagccatcagttaaacaaatgagtcaacctctgatctctccaggaacctaaaacagctcttgccatttggtaatgctgggaactcactaccttactaaaataatgcactaaacattgaaaatggatgagttgttgtctattcggacttagtctcaaaaatctkccattgttgtgtttaggtgagtgagtggcctccagcatctagaagtcgatatttgtctgggagtgtcagtcagagctttgtttcttctcaggaatgtgttcatataagcaacattgaaagcattgctgcaaactgagcttgaattcttctcacctcttatgtagcctccgaaatccaagggaaaatgctatcaatgaacggattcagctttcaaatgcctaacttctagtcatcttggcagtctgayaaatttaagttttttaagtgaatttgtcatagagtggggtttaggatgccaaatacataactcatttatatttattttttaaaagcttatgatcatcttcttcaacccataaaacatttttcgaatgacaaaacagaaaatgtatacttttataatccagtttttaaaaagtcaaagctatgataatcttgtcatttcagaaaggtaatcccagtgcatatttctccatgcagcttattgacgtaacctaagatgagaagacactactattcatgcctggtcagaaagcacagactggctatgtaacagccccagcaggraagcactgggtgcaagacactggattaaaytgagacaaatgtttgcttctcagaatggcagtgaccatgggtgcttgactgtgggtggggatgacagatttcatgctttcctctttcagaatcatgtctccaacctcctttgtatatggcgagtccgtggacgcagccaacttcattcagctggatgacctggagtgtcactttcagcccatcaatatcacccttcaggtacccactcctggagacctcctctgtccgtgggggctaacggaagggcacatgggatgtctctcctacagagggctaagctcttgtcaggagaaacccttctgtggttggctggtgtggtgtgtgtgtgagatctgtaaccacacacagaatgaatccttttcgatgcctggtactctgctgtgcaggcccctctgctttttcaggatttggaaggacaggtccacgtcatgaatgccagttttccccaagaagccctctgygtggtggaggcctcagccaatgtcccagcccagatgaccccatgaggacccctttctgttctccatcattccccaccttctgggcagggctgcctcagaggatttgctgtgtcccttcctcctgagattttcttgccagctcatccaggagcccactcctcctgcaggggaacagcctttcggaagggcagttttataagaacagaggagtgtgagyccctgtgagcccccacgggaggcacgctgctccctcactgagccatggctggcttgcccaggcacacaggcatcatttccagcaagtccacttggtgtagactgtggacctcatgaaggacactgtttcttctcttagttgggggtcagcaaactttttctgaaaagagccatggggtaatttaggctttgtgggccatttggcctctgcagcatctattcaaccatacttctgtagttcaaaggcagccatagataacacagaaacaaaattttagttccttatagacaatgaaatttgaatttcgtataattttcacatcatgaaatgtaggcccaagcgagaaaggatatcctgaaggtcccagagctgggagaagccgggctggggccaagacctggcggcactggccggaccctgtgtggatgaagtgaaggagatgggcccaactcacccataggacacaacagtccatatctcctcactctctggttctacctcccagaactcttctctgcctcttgcgtccttccccatggagagatggtttcccactctggcattcactgctgtggctaaataataattattttctttccttgtggcctctcctaggtggacttaggggatgacaaataatgacagggtgagggtctagagaatgtggcagtaaaacatttgtgggctctgacaaacaatggtcttcctctccccagagtattctcccagcaacagactgcgaaaccatgatacataacacatgtccccagctcacagaggatgtgccttctgaccaactaagcccctgctgtcacaccctgctcttgatttacaggggagaaagggaaggatggggttagagcttgtttttgagacagtagagtgattgctgtgaacagcacctctgcatttctgaattgcttctcagagttattttmtttttctcctttgcttttcgtaattgggtaggamatagataaagacctgatgggtttatttcatcttagttgtttctactctttcctactcttatagttttgggggtgtcttgcaattaaagatgtagttcagaaaattatttagaagggttcaagtaacacagaccatgtaatgaagagggtatgagtgttgaaagaaggaaaagaagaacaggggttgcacagaakataccaaatgttcttatcaccctctggggaacaaaagaaagaaatctgagggtatgcagcttatccttccagttgtttctctgaaggtaatttttacagtgagtttaaagtttggtattcaggcaaatagttttcttcacatctgacctgaaataggactcaggctagagaatccagccctggggaatgagtgattggcatgtcccttagataaactcctccgtgatccattgcctcaggaagtgcacagcattcaatccagggttgagagagttgggtctgaaagattgatagtgtgtgccattgattagaaggagatccttctgtgctagcaaagcccactttttccttgagaattgtctgactacttatttattggtataatggttgttattgtggttgtcctgcaggaaggtcactaaccagcttggcagtgataatgaccagaaggtgaaaatactgtggaaggaggccaggaatacggagaaaatgtttctatatttccttattccagtaatattgttcctgaaggagaacataagactttccatatgaacagatttttctatgcttttaaaaatcggttattcaacaagctacataattgtttaaaggctccactgccattgtacacaggagaaaggcagaaatactagycttgggcctgctttttacatttcatcatagtttttaaacagacacattaatttctcgacaataagaggcttttttggcatcaaaatttaaagcatttccccacctgaaaaacaatggccaaaaataatgcagatattacacatgaacatttgcagagaatccagtataaagacatttgtkaaaaataaagatggtaatacaagctcwcctgtcctcctggctctgatgagtgaaatagtgcaaatcagcatccttttcttcattgcttaccccattcatgcttgaaatgggatttcccagacatgccaggatgtttctttttaattctgtgcactcatgtttcactkcaaattagttatttcagctatggtcagatattccttccttttctatgtcttcaggttgtttggtgaatattgttcttttttgaatcaggagttggcaacccactcatctgctctatcagttkttatctatttattctttgaagtggaaccaactattgcagaaaaccaaagacacagttttctagggaagagctagctggagctagatcttcatacatcctgtcatgtgtgaagacctggtaagatttctggctttttgttggctctgcccttctgacctcaacttcagagttgcagattccctggattctctctctagtgcccaggccaccaagcagcatgtcattccttcctctctcctacttatcctttttaaacatttagttttaaattgacaaaacttatatattttatattttactcatctttttaaaaataacacctttattgagatatgattacataccttaaagttcacccatttaaagcatacaattcaattattttaatatgtttacacaattgtgaacctgtcatcatcatctagttgtagaatatttttaaatttttttcattttaatttttgtgagtacatggtaggtgtatatatttataggatacatgagatgttttgatacaggcatgcagtgcataataatcatgtaaaatgggggtatccatcccctcaagaaatcccttgtgtttcagacaatccaattatactcttttagttactttaaaatgtactattaaattattattgactatagtcaccctattgtgctatcaattgctaggtcttattctttcaatttttttaatccattaaccatccccaccaccccccgccacagccatccccccattatccttcccagcctctggttagcatccctctactctctgtctgcatgagttcaattgttttggttttgagttcaattgttttggttcaattttgtttgattttcacaaataagaacatgtgatgtttgtctttctatatctggcttatttctttccttttttttcttttttttttttgttttgttttgttttttgaggcagtgtctcactgtcactcaggctgctggagtgcagtggtgcagtctcagctcattgcagcctcaacctcctgggctcaagcaatcctcccacctcagcctcctgagtagctgggactagagttacacaccaccacgcctasctaattttttttgtggagagggggtcgggttttagatacggggtttcaccacgttgcccagctggtctcaaacatgcctgcctcccaaggcttattttacttagcataatgacctccagttccgtccttgttgttgcaaaattttggaacatttcaatcacccccaaaagaaatttcggccttttggccagaaccaccatcttccagtaattcgccaaaatgtcgaacacaaagggaaagaggaaaggcacctgatatatgttctctaggctttttagaaaacatggagttgtttttttggccacgtgtatgcaaatctataagaaaggtgacattatagacatcaagggaatgggtactgttcaaaaaggaaggccccgcaagtattaccatggctaaactgaaagagtctacggtgttacccagcatgctgttggcattgttataaacacacaagttaagggcaagattcttgccaagaaaattaatgtacgtattgagcacattaagcactctaagagccaagatagcttcctgaaacacgtgaaggaaaatgatcagaaaaagaaggaagctggcggcacagtagctcacgcctgtaatcctaacactttgggaggccgaggcaggcggatcacctgaggtcaggagtttgagaccaacctggccaacatggtgaaatcccgtctctactaaaatacaaaaattagccggggatggtggcagccayctgtaatcccagctactcaggaggctgaggcagggagaattgttcgaatccaggaggtggaagttgcagtgagccgaggttggcccactgcactccagcctgggcgacagagcaagactctgtcttaaaaaaaaaaaaaaaaaaaagaaggaagccaaacagaaagatacctgggtccaactgaagcaccagcctgcaccacccagagaagcacactttgtgagaaccaatgggaaggagcctgagctgctggaacctgttccctatgaattcatggcataataggtgtctaaaaaatgaaagacctctggactgtttaaaaaaaaaaagaaaaaagaaaaatccttaacccattgacatagcttcttgtattaatttcttattgctgctgtaacaaattactacaacatttgtggcttaaaacaacacaaatttgttatcttacagttctgaagaacagaagtccaaaatgggccycgctgggctaaaaccaaagtatcagggcctgtgttcttgccagaggcaccaggggaaaatccacttcttgcctttgccagcctctaagggctgcctgcattctttggctcatggcccccttccatcttcaaagccagcaatggctggtcaagtcttaggatgttctctttctgatctgacttctgcctcttccctatataaggactcttgtgagtacaatgtgctcacctggataattcaagataccctctttattttgaggtcgcttgattagcaaccttaattccccctggccacataacattcacaggttccacagatgaggacatggacatctttggggggcctgtcatgctgcctgtcctactccctattcttcctgctccccagccctaggsaaccgctaatctactttctgtctctagagatctactcactttttttattcctctgcatattctgtttcttcctcgagtttcatgttcagctttttcctctccctccttgctcttactggtctctgygacctccatctttttcctcatttctcaggaaatgattgacttctgaagacagaaaatggagaaatgctagggaaaacaagagaggcaaagttttatagaaccaaatgctgagacagaagaggggtacagttgtgcaagtgatgagctgcagattgcctggaaaccaaatcagctggctcatgtagtaaaaacagccctttctgtatattcgatcgcttggttttgggatgacccacttggtccttgagggcctcagttacctcaaactggcaaaggaaagaggttggaccagatctgtgggtctcaagtggtggttcctggaccagcagcagcagcatctcctgggaccatgttataaatatgaatctgccagccccaccctagacctactgagtcagaaactcggcatgacccccactccatacccccccaccaaaatgtgttttaacaagcccctcagatggttctgatgttttgctgaaatttgagaaccactggactagattatgatgtctgagttctcaccaagtgtaatagtctatgagtaaattcctatgcatgtaaaaagaaaagttttagcaggaagaagacaaaatgctgaaagagaatatggtartttcaaagtttgagatttttagatgcatgttagaagtgtttctattttgttgaaatttcccgtcattcagtagttcactttacttcaagttgtgaccttccagatccgaaccttagagtttctgtatgtgatttcaaagaatcttagaatatatattgcatgacaggaaatggaggtctgctattttccactgagacttgctgtgtgtgttccacacccacaggtctacaacactggcccaagcacccttccagggtcatctgtcagcatctctttccctaatcgactctcatctggtggtgcagagatgtttcatgtccaggaaatggtggtgagttctccatttgttttcactattgctttcagctttgagccagcccattcaaattttgtattccaccctaccctgacatccaccttgagggtttggaaaattcaactcattctaccctttggagacatatctggagaggccaggggacctgtgatacctgaatttctacattgagaccatttggttaatgctgtaagaagacctctttggagatggggaagagttaattacgaaccagctcctgggatggacttcgctggctctgggaacccccagcagcatctgcagttgcatgcgtctgaatgcattttgctgagtgcattttgcacagggaaagtgcctgcagtccatgttgagaggattgtgaaagcattgctctctataggggcacgtgaaggacattcagccaaagggacagtttttccatagatagcttgaaaatcagggcagcaaggccmwtatggagcaggtgaatatctgagccgagagttgaagaggacacagcccacagggtggaggttcagaaaacattgtgtgatggtgacagtaatttctggcattgctgccctctgggtcatgtggactgaaaaccagacgcatgtgaatgttgaatgtagaacaggtcactcctcccgagatgccagctcagatgttaacatccctcatgatgttccattccagttccatggcatccccttgtctttgggctctgctgacccagcagaagaaagccgccagtgttccgcacctatgatgtactatggttggaacttagcatgaggtgaacaaaccacacaggcttctggctaccctcttaaatattattaaccatgctgaccatgccacatttccccagcatctaggagtgttctcttcctagagcatgctttctgagttgttcacrtgaacatctacartgttgcaggagcctttttttttcctatgggcaaaatcatctattgaccaaaacaagacatttaagtcactcagattctgaaggtaccccaaaaccagggataccccttttcctctttactgatcatcgagccaaggaaaagccactggaagggacttgggctcacacttacaaatagctggcttgcatggaaggcattagaagtggtttcctgaagacctggacaactgcctggctatcgttctggctgagtggaccctcagatacccaagtggtgtgagctggctgcactctgttctttgggctctgagaaacaaatcctttggattttcaaaactatatttagaattttcataaagtctgtaacagacttggccctaggatggccaagtctccatctggatagcccagcctgtgatcaaaggctgtgggcatcttcatcgtatggaaaagtaaattcactggcacatctcactaagcaagtaggaaagctctctgtgttcttataaacgatcaccactgagcccagaatgacaacaagagtagaagcataaaagcgagtgcatgaggtgctgtagtgaagaggcgagagtccccagatacttgtttcagaggcccacagctggcacaccctctgccttaaagccctcggcaagggcctcctgtggctccgcccctcccttgctcagyagggcctgagaatgctcactgggtcaggtgtgattcagagctcatgacggtttccactttggccttatgggactttgaatggagcagggctttcattctggggatttgggtggcttggtgcaagtgaaattcagtcctattaggagaaaccagcactcattctctgtactgcactaggaggtgaccctttggcctggtggcattccctccccacccccactctcagccaccaccattccccaacctccaaaggctactgaacagctgggcaccagctggacatgttaagccaactgaagcagaaacagattataggcatggagggaaggctcatctgtcattcctctccacacccttgggaccctcaaattgtttctccctctctaacagtgcccttggtgtctgtattgcctgtgatcatcatccatagagcataatgaggawkggcttactcgccctatgggccctgggctgtcaccctacctacggacccacgtgtggcacagttttctgacttggttcagaattcatttagaagtctctggggctgcttctggggtccctgggcaggaccaacctgcctctagctttcaccaaagagtcttttgtgtttgcccaaagcatttcttgaggtccagctgtctgtaagtggagagtgtctggcttatatatgggaggtttttacggggagcctaatgaagtgtaaccactccaaactcccagccttggctcgtgatcttctttccttgtagctaatgtctctgagcccctctgctgtgcttgtatttaccttaaaaacagagccacggtggtsgcytgaggaaagactatcaattttcactgcttcccacccacgggggttgtgtggaccctactctgacttcccacagcacagaaaaaaaaggaaacaggtcactgtggacctagtgtctgtccatcaggaagccaggttgtaatgatcatgaaaataatagaggggaagaatgacagacctttctagtctatctgaaatagcaaaattacyagtaacaaatcattcttgatttgttcacaaacactggctcagcaagtacctattacgtgccaggctccaaggagaggaataagtcccacatctgccccagaactcactgtcttgcaggaaacagatacataaaatgccattgtaataccgtataacaaatgcaataatggaggcatgcccagaccccaggatgctacaaaggttcagtgcttcacaaaggaacctcttcaagtcagggcttagaggatgtctagttcaccaagagaacaggtgaagaagagaacattccagatagaggaacagtcaccacttgtgagtgtatgatgagtatctgctgtgctgggagctacacccggttctccattctgttwgcctagctcttatacaaataggcaagagtaagtgttccgtatgccttctgcagatgtacagcagatagatattttggcagaatgacagagagtactgaaccacagtcatttcctctgtcagtttgtaaattaatcactcttcttgggtacatcgtgtgtgtgctgtagacctgaaccttcctacctgctgacttaggcatggagaaggccaagctccctgtttgatactagagtctaactacatgtcatggacattgtcagcaaaccacccttggcctgctgcaatgagcagtagctactgacctccctagcttacttttttccttctattggacagtcattctaaaaaactcacctgatttccaggaataaaatgagtgagccagacagcttatgggaggcaggctgtgtccacttgctccttagagatttctttttgaagtgaagatagatcatcttctcaatttttcagaacagacctgaaaaattgaaccacttcactttattgccattcttctgcagaggcgagccgtgtagcatagcccctgagcacaggtctaagattgcaccaagataacacatctgtcacaagcttcatggcttatgaagggragagggtagtggtctttccaaagttaagttttactcacaatttctgaaggttcaatggaagagatgggagctttatctcagactgcaagcttcacttgatggagttaaaaacctgtatctgtgagcagctttctcacactggaggagaaggctttgggatttggctcttgttaatatgcaagaaggggaaaagtcagaaatgatagctaacagggagtgaagggctagaacttttattccaggtgaaagtactggatttttgaaagaactctagtgttagtccagaagagatataaaataaatatcrtaccattcattcctcctcctgcaaaaccaattgaaaatattggcctctctggcttgttgttttcttgctatggggcagtgattctaaagaactgacctgatttccaggaggtaaaattgtagggatgaatgataattttctaaggagatayatcaatgtctttgccatagggtaccattaggacattgacttcaatatggcatgaataccaacatctgttagaatattccaagttggtgccaggactcatattttagtaaactgtaaaatcttccctccccatgcttgtacagtagacagggctacccatgatgtacgatgggtatcccacaatgagtcagttgatgtgggaacttcaattaatttatagtgggactgctcacatccctatgaagaaaatatgcacctgatacatcactgaccataacaggagcttaaaattagacataaatggaggaatgaattgttttccccaaggatgacctggaggagcttcttaagttggggccatcaaatcagtcgatataatccaaagctaaagagtaaagaaattactcctgaataactgacccccccaaaaaaatgaataccatttattgctgtcccaaggctttagtagcctttttcatgtgctgtcaaatttaatccttatggcaccttcataaggtaagatcagcatcccaagttgaggaaccaagcttcaaggatttgcccaacctgacacagctgctaaaaagtagagctgggtttgtaaccaggtctgactccaaagttcacgtggttcccattgtgctgaattgcacactgctcctgaaagtgctgcccactccctaawcaccagaggcaggctcagtcaataggacagacagatgakgagtagacccccaagaatcacccaccagaggaggagcatcaacaccagggcagagaggcagcaaccgcartcaaaagaactaataccagagggtgcagtaacaaggccaacagaaggcttctgaataagcaagactgatgtyttcagagcaatgcaaaaagacagtgtttccatgaaacagaataaactagagatttgtaaattcaagatattgatcattcaaatgaaacttcaatataagccatagagtagaataaatattaaagaataaagtaggggattcgaaacttggattttctgagaatgtattgcagaagaacaaaaaagccagttaaacttattcctttttttaaatagcaatctggaatgaaaatatcagatgakcataatataagagttagaagtcaagagagatggaaatgaaagcaagtcaagattcttgtcttggggggacaagtttatgtaccaattagctcaaggctttggtaaaataaatgtttaaatatgtaaaattttaagggcaacaaaaaacaatgtaggacatccaaaccactaaagaagaagaatttaaaacataattaaattcaaaacaatccaaaaggaaagaatttatgaagaaaaaaataaatgtataataagatggaagtaataaacctaaatatttcaataatcaaaataataattaatggattaaatgccctaaagacactctcagattagaattttaaaaatccaagtaccaaataacttgtaagaaatacaccttcaaagttacccagaatgtaaggcattcaaaaaaaaaaggcaaatattaacccaaagaaataaagtatagcaatattaacagcaaatgaagtataattaaagcccaaaacccacaaacattaaacagagcaaaagaaaatatatttcagagtgttaaagatttagtccactaagaatttgtaacataaatgaaattttatataaccaacaacacagctttaaccatagaaacacaaaaagaaattgacacattcacagtcattgcaagaaaatttattgctttcccctcaaaaatcatcacacaagtaggagtaaaataatgagtatttgaataatgcaactagagttgcgatcatttatatagagaccaagacagaatgagtcagaatgtctgattttcattactgctcccttgtttaccagctatggcaacctataggaagttaccttaactccccaatcttattttcctcatctgtaaaatgaactagtagtagtacctatctcacactgtaaggactgaagaaactaatttatatggagtaattaacagagatcctaacataaataagggaatgcacattcttttcaaatgtgaacatttacaaattattcaacatacaacaacacaaaaataagcatcaatggaatttttaaagtcaaagcagtagaagccacagtctctgaccacaatgcaataaacttggaagctaaaaacaaaaggttaggcaaacaaccaaccaaaaacaaatccacttgggaaattttaaacamcattcaaattaactttttagaaaaaaaagaaatcaaagttgaagggatgaacaaattagaagtgaaagacagtgagcggttgttcatatcaaaaccaatgggatttaracaaaaccaacacagaggaaaatgccactacttacatgtggaaaatagggaagactgaaaataagtgaactaaattgacaacataaaaactagacaagggacaatgaaataaacccaactcaaagaaagtaaaatgaaggtattattaaagacaaagcatatcctgaaatagaaaaaataataacaacaaaagtattccacattagcaaaatcaaaagctgtttttttgtccaaaaaaatagacaaacctgcagcaagcttcaacaagaaataaagaagagcgatgatgccaaaaaacaacactagaaatactttttaaagaagtaccatacttatatgaagatttaaaatttataacatcttttgagctgggcatggttggctcatgcctgtaatcccaggactttaggaggctaaggcaagaagatccttgagcctaggagttcaagaccagcccagacaaggaagtaagaccttgtctccacaaaaaataaaaaacaaattagccaggcatgtggcataaactacttgggaggctgaggtgggaggatcccttgagtccagaaggtcaaggctgcagtgagccatgttcacaccactgtactcaagccaggatgacagatcctgtctcaaaaaaacaaaaacaaaacaaaaaaatcttttcaattktattcacacaaagataaaatytgaataaaatatgcatgaggttaaaaaaaaagtccaactagactatyttagaaaaaaatgtaaaagtagacaaagacctatatcttaaaaaaaatcaccgacccagatagctatataggcagattytagtaggctttcaaggaatggataattcttatgttaatataagctgttccagagagtagaaaaagataaagmaactcattccagaaaactaacatagccctggtacagaaaccagaaatggagagcgggcacactcacgcaaaaataggaagcagtgagccaaactcactttgaaaacagatacaaaagttytaaataaattgcaaattgagggccgggcgcggtggctcacgcctgtaatcccagcactttgggaggccgaggcgggtggatcatgaggtcaggagatcgagaccatcctggctaacaaggtgaaaccccgtctctactaaaaatacaaaaaattagccgggcgcggtggcgggcgcctgtagtcccagatactcgggaggctgaggcaggagaatggcgtgaacccgggaagcggagcttgcagtgagccgagattgcgccactgcagtccgcagtccggcctgggcgacagagcgagactccgtctcaaaaaaaaaaaaaaaaaaaaaattgcaaattgattcctattagaagaataatatagtctgggtaaaacaggatgtaatccaggaatgctaagttggttctccatgaggaaactgattaatataactcattatatattattattaataataaaaggattaaatgaaaaataaccaaatgataatcttgataagggtttctaaaaagttaaaaattaaattcaacatttatttatgatattttattacatttccagtaaggaaagcatagaagacttcctcaacttgacaaagaccctttgccagaaacctataggaaacttcaagctaagtgaggaacaggcatgagtccctgctagtgtctcttcagtttagttgtgttggaggccttaacaataaaaagaaatgatagcctttattcttaaaaaaaaaagtatcctattgtaaaaattgttattgtctccctaaaaaaatccaagagaatcaactgattggccctgaggacttgtgaatacagaaggtaagagctgaagctgactgtaaactgcctgatcttcaaatgctttccccagagacacacacagacccaccaactgagggtgaaaaccttcctagatcaagatgtttacatacagcctctgaccagtcactggctgatcactaagctgtgctgatccaggacagcccctacaaaaccaggcttaaaaataaaaacaagtgataaatatatatatacatatatatatacccacacacacacacacacacacacatatacccacatacatatatatgcatacatgcaatatatattttgccagcagaaacatcagaggctrcacactccaggaaaaacagactccagagactatgtctaggcaagtcactaaacaaacaaaacaaaaaaaaagtaacaactacccctcaatgggaggggtaagaatccagaattgctacaatatattatctaaaatgtccaatttaaatacacacagacactgtatatatcatatatatttctcatgtgctatacaggaagaaaaaaacagttaataaaaactgaggaacccagatgttggatttaacaaagacttcaaagcagctattacaaatgtttaaagaactaaaatcagtttaaataaagtatgacagcaatgattcatcaaataaagaatatcagtaataatattgatgaataaattaaaataagtggaaattaaataaatgaataataaaatagatggaaattataagaaccaaggggaaattctggaattgaaagtaaaacatgggcygagcatggtggctcatgcctgtaatcccagcactttgggaggctgagttgggcatatcacctgaggtcaggagttggagaccagccaggccaacatggtgaaaccctgtctgtactaaaaatacacaaaamttagccaggtgtcgtgggcaggtgcctgtaatcccagctactcgggaggctgaggcaggagaatcgcttgaacccgggaagcagagattgcagtaagccgagatgtgccactgcactccagcctgaatgacagagcaagactccatctcaaaaaaaaaacaacaaataaataaaagaaagttaaacacctgactgggcacggtggctcatgcctgtaatcccagcactttgggaggctgaggcgggtgtgaggttaggagttcaagaccagcctggccaacatggtgaaaccccatctctaccaaaaatacaaaaaattagctgggagtggtggcagatgcctgtaatcccagctactcaggaggccgaggcaggagagtcgtctgtaatctcagctactcaggaggctgaggcaggagaattgcttgaacccaggaggcggaggttgcggtgagccgagatcacaccactgcacttcagcctgggcaaaagagtgagactctgtctcaatttaattaaaaaaaaaaaaaagcaaaacacctgaaatgaacaattcattagaggggctcaatagcatatttgagctgacacagaatcagtgaacttgaagctggattacagtacagattttccaatctgaagaacagaaggaaaaaagaataaaacacaagcaaaatggttgaagccccagaggcctttggtgtgctttgtgggacaccacaaagtttatcaagatatacacaattggagttgcagagaaagacgatagagaaaagagggcagaaaaaaaaatttgatgaaatatcgttccaaaacagtggcagtgtataaactcttcaataaatgatatgaagacaattggctatccatttgggaagacattagagaaagcctgtacctcacagaaaaaaacaaacaaacaaaaaacaggtgaattaaagttagatgttaaaaaaaatatttgcagaactgaatattttcataatctttagatgggaagctcttcttcctaagcaagccataaaatcctgaaaccataaagaaaaaattaacaaatttaaacctataaaaatgttaaacttttatgtgatcaaaatacatcataagggaaaagatatttgggagaacatatttgcaacatgggtaacaaatagataatatataaattacttctacaaaataatgcagaaaagaccaaaaattataaaaatggttgaagttatatgaacaggaaattcacaaaagaagaaattttaggggctgggtgtggtggctcatgcctgtcatcccagcactttgggaggctgaagcaggaggatcacttgaggccaggagttcaaaaagaaattttaatagcaaataaacatatagaaagatgcctagcctcactggtaatcagagcaatgcaaacttaaaatgaggtttttctcctcattaaactggcaaaaatctaaaaaattgttaagatccattgttggttaagatgaagagaaatgagcactttcaaatactgctggtatgaaaggcaatttgacaataactaccaaaatttaaaatatgaatatcaacaattccacttttaggaacctgtctcaaaattttcacataatatatccaggagaaacttctaattttctgatagtaggtgtatattatcagggttctcagcataaatgttgacttctattttggtgaagcagaatataactttaataatgctcccttaggattctgagagaaagttgttagattcagaccaaaaagtatgaaatcttactaacttattacagataggtatagtgcagagatactgtatcaagtactttacaagaacaaattaatctaatcttcataataatttcttaaggaaattgaggcaaggaagagttagagggaaggccaaggtaaattggtaagtggctaagttgacgttcactcttaacagtggggttcactgtgaaataggagttcagcaggacttgtttctcaagacgcaggtcacagagaccccgctgataaagcaggatgtggtaaagaagccagctgaagacagccagaatcaagatggtgacactaatgataattcaccagcaccatgacaatttacagatgccatggcaactcctagaagttactctgtatgctctaaaaacagaaggaaccctgggttctgagaattcgcagcccctctcctgtaaaactcatgaataatccactccttttttagcatttaatcaagaaataaccattaaaataggcaagcagcagcccttgggyktgtktwacctatggggtaaccaccttttatttctttactttcttaataaacttgctttcactttactctctgggcttcctcttgaattctttcctttaggaagccaamacccaccggccctcccaggccaaaccccaatttgggggttcatcctgccacaactgtacagtgtggggtcaaggggaacccttggtctttttcactgaaaaatcaactcagaaaaggcagattaataggagaaaaggcacacagatttatttaacttgtatacaggggaggcttcagaatgaagacccaatcccctggtaaggtacagaagcttatataccatcttgaggttatagaaagaatgcaggctcagagcatgaccacaaccaggttttaatggcaagacatgtcatgggggagagaaagaaggaggcttggctagcaaaggtggcattgttatgtagatgaagccttccaggtcataactcctagagagaatagatggtgaatttcttttcagacttgtaaaggtgtcagactcaatctgtcctagatctgggaaaggcctggaaagagaagggctggctgcattcaaggagattctctacaggtgcaaaatttccccacaagagacagttttgcaaggccacttctgtctgctggcccagcagcagccatttcaaacgatgtcaaagaaatctattttgggataaaacattttgatttcctttagccacttgcagggtcttgcgccatccttttgtctgggtgcgtagctgtccagcagctctagcactacctggaagttgaggcatggtcatgcagaactaaggccccacccaggcctgctgagtcagagccttcacttcagcaagatccccagggattcctttgtctgttcatatttaagaagccctggtctaaagcatgagacttaaatctctgctctcccattttcttatctgtaaaatggtgatgacagtcctcaccacaagaggctgttgtggggatatttttatacacatgttcattctttcaacaaatactttgcgcccagcatatgctaagcacctagtgcagagaggaaaacagacaaaaagtaatttccagccatcatgtagcttacattctggtggggaaagagtaataagtaaagcatatagtttattacatgatggtaaatgctctggagaaaaatttaaaaagcaagaggatagggattgggaaaggctgtaattttaaacggagtggtcagggacagtttcacggagacctttattcagaagttgcagggaccaaagctatcttacgggagtttgcaatgagaatttctttgcccatgragtccttgccaagtctatgtcttttctgagaattctctcccccttgatttcagccctgtttgatttctgacctttgaaatgccagcccccatgctgccgttgtgtggggttccgactggacatccagaagtctccgtgtgtgttctcattagctttcactctgggggagttttctgccacaatgtgaatcacttattttgctggcagcagcagttgacagtgacactgatttttaaagcctgcacatttcacatcagaaaagtcctggattttatgacttagctatgcttagaggataattgcaacaagaagtctcccctgcagccagcttattggagctgagacttgtataagagccagacctggcactttaaacagcccagcaaataacccaaaacaaaaatgaacaatgcacatttttatctatgctgctcttccccatcatgaacacatgcttctttttttcctcgccttcaccctcaattttttttgtggaaattcaatggttgactgtaccaagccagctctctgggtgagaggttccttctaacaaggattagaaacccctctcatgtaggaagaggtggatttgggggattatatgatccaaccctctacctttggacagaatacaatcgagatgtctccccagtacacagaactgcttttccagcaagttctctttgttaagccattctggtatccctcaaatcccttgttatgactatccacaattctccatgccccatgaccctttcttagctaaaatgaaaaataattgcctagttccctcatgtagagaagttgagctattaccttgacttcccccttctcttccaaaaaagattacaattcctttaattttctttcccatcctagggtgtcctctttgctctctccatattctccaaataaaaattcaaaactgagcagcaaatcctgtgcctcttcatccaacccctcctcatcatgaatcattatcactcaggaagtaaggacctggtttacyatctgagaactttagtcctaataatttctctacaccaacttctagtcctaataatttatccgtataatgctcagaaacactccgagattctcagtaaaaaaaaaaaaaaaaaaaaaaaaaaatcarggaaatcttaatggccaaagccataggtccaaaacccggcgttccctcccamccaactttccaggccattttctccaatagcccctcatccctgaccttgtcttccagcctccctggaccatgaatgctgctgaaggctctcactttgtacttccctgggccccctgcccttgctagtgacttctcctcccctctggctgtggaaagctactcattcttcaagacccagttcatatgtcctctctgtcaaggcttcccagatgccttcacagatggccctgcctcagggcctttgcacctgcctttgctgagaacactgttccctccaatctttgcatagctggctccttcttmttatgcagatctgagcccagagttcactttctcaataagtcttccctgaacactttacctaaagttgcaaacccccattactctctatctcatttgtatgttgttttcttcatagcacttgtcactatgtgaaattactctcttatcatcagtcttcttccacsagattaaaaacaccatgagagtaaagggcaaggtccttattttctgtgtatttgcagcatttggtgccgagaccatagtgagtggtsagacaaatgaaagaaatggctgcttccactctgttagtggcatcctcagacacacagtcaccccttgtatctcctggggattggctccaggacatccccccatctctacttgagatcgcccagtaggaatattttgaacaaattcctttaacccatggcagaggttgccttaatttcaatgtgagaataagaaggtgaaattttgaaataagagattgaattacttatcagaaacgaaagcttcttagagcaaatttaaactctacaaactttggtcagggatttgaacacatatttccttccccctcagtttctctcacacagacactgctgatytcagtaatggccctaaactttcttttctttttcttttgcattttcttctttctgcacatgtatgaatgcaagctgaatagtcaagttcctgaaatgggtcaggattakgtttgccttaaatctttttctcaacagaagccaaacacttaaaagaagggagatggctgattgaattctggaacaaaagttacattcctaggctcttggttaatttgagcttggctagagggagaaagcgtgtgtgtttctgtgcacaagttacactcaacacacaccctctggaaggtgggggtaagcttcagtcccgrctgtccgtacagagtgtggttcagaggctgccctttaacctgtgtggccagagagaataaatcaagccagcagtgctgtctccctgctgactgaaggygcccggccttatcaaggagcccaaatgtcttgtgctcacagctgctgtgacatctggaagcattaacactttgttgccagcatgtaggctagttgaatgccgatgcgtaggtgcctggtgttttctggtctgctacatgaataggcgtcaaaagttggtggtgaggagtttgcttacgttcattccttaaaagcaacatgacacagagccttgccatggcaggggtgatgggttgttaccaaagtcgataacaggaaatctcactgaggataaacagggctcatcggccattgccgagaaacacatggttctcatttaacctgccaaggactaattgtgtatgcttcggaagcgcaaaaacaggaaaacgcttttctgacatacaccccaagtttcttcagaccaaaaagaactgcctcaatgttgttagacgctgagaagtaatgatctccccagctgtcagggagccaacctcacttacttctctttaatctaaacttatgacctaaagcatatttcaggcctcccatgaagtccttgaaacttgagacttaatgaaggacactgaggtttcacttttcactgctctggtgtatgtactctcagaaaagcagtggaagaggttagatagatggtgatgtaggaatcatggcatccagaaaatgagtgtgatttaccctttgataaaagggaactaataaagcaatatatgcaggaaatgcagagacaacccagtgaataggtgtgctgctttagcctttaagggaagatgggtctgagcttcattctttaccttaagatgggtccaagagctagaaccagaatttaaacaagcagatacaattccaaggaccatgttttgtctcatatgggggctattcactcatttattacccaaatcaacagaccattctgcttccaaaatatttcattatctgtggaaggaaaacatttttggtatgcatgtcaagtgctcagataacatatttatgtatcgctttttcactaaagagaatctgacsgcatctggaaattcttttgtgtcactgcctctctcagactacttcccatctgtatcgctttaactccaataaaaggccatccccatgcctgggaaatgggctttgtctggggaacttgtctttctctgattacatgtaaattaattaaagcccatcccgttttacagggcagcctggtggtggtggcctgcactcttgactttccagcatgttggcctgtcacacgcaaaggaagagggaggaggggaggatgcaggggcattgttttagccaaaccctaaagctgatggaaatgaaatccactggcttttatcatgagaagtgaaattgttcatgaaataatggcagcctcatacagaggctgtgcattggattatactcaacctttcctctgaaacgttggtctggaggctttgcccctttattttcagtttcagatttgatctcagtaacaccctgaccttttcagactccataccacttttcacagggatgactgccttaagggatggggaaagggttagagaaagcaagtattttatttagaagacagttttcagttagaaagggagaagacatctagagttaaagttacgatcttttcctttctgtgcttaagtgatactaggtcattctttaacttcttgctccacctgctctatccccagctctgcaggtttggagtggsctgtcatgtgattttgtttacccgtttcggttcaaagacagaactctttatttgaacactgaagctagcagggactgtccaaagccagagcccctcatattagcctagcttatgttgttgtgatcatcagactgtttctgttttttggatttttgtccwtaaataaacaccttggaaccactagctacacagaggggtaaatatcagaaaatccaaatttggtgcactaatgaacacggggtctcttttcacaaagcaaaagaccatcattcttcagaaggatctcccaaagaatgccattgaaaactcctcattaccttcaaatggggtgatgcacacacgagtagcatgaaattagscatgttcatattaaggagcaatctaagatcattattgctgtttctctggccttatattaaatagtgtcattgcarttgaaaaattagagtaaatgaacagagcctgtgagcatccaccctttgtaggttatcctgagtctgcattattacagggtcttgaaatgaatggtgatacgtgaaagtatttktcctaggattcattaatattattatatttwagtctttggtcaatatgaagaaatactcaatagtaaatcatagcaacatgatttaacatgagatataatttgaagggctctttaaggctgctaagcaaccatgaatcrtggtttgcatttttctagatggataatatgaagctatcttatttatctttctagaactagacaccttaggtcaggctaatcaaccagctggtatcatttctcagttattgtatgactactatctttatttcaaaccctgaagtcctaaaattaatgtcaccacagccattgtagtatgtgttcagccgcctgtgccggaataggggcttactgtcttttgatgccttggttctcagagtaggcaatgggtaattgaattagcaaagtagacattcaaaacattctctgagttttcaaactcaaggagcgtgtgacttcagagaagcaggcgataagtcagggggtgggtcatgtttacccggttgccgtcagctgcgattggtgtaatatgatatggaaaagtggcccagggatgtaactgagaacataaagtcaatgaataacacagaaacgtgagttaacaggaaacacatgttattctaaaatgaacctaggtcccttttaacccaagccaattcaacaaacatagcttttagatcataccttttaggtttttttttttttacccaaaaaccacactggggatgactccagccgtggctcatggggaacactactgtcattcagtttgttcctctgctaatttaatcttccattttcctttgattggtgatgcacgcattcaaggggcatcaagccatggacactttggtgaccctccctatccttggaaccccagccagctgatggggttcgtactggtaaaatggcaaactggtagaggcatctatgcttctgcctgttaaaaatatactaataggccaggcgtggtggctcacacctgtaatcccagcattttgggaggccgaggtggacggatcatctgaggtcaggagtttgagaccagcctgaccaacatggtgaaaccccatctctactaaaaatacaaaattagccaggcatggtggcacacacccatcatcccagctactcgggaggctgaggcaggagaatcgcttgaacccggaaggcagaggttgtggtgagctgagattgcaccattgcactccagcctgrgcaataagagcaaaactctgtctcaaaaaaaaaaaaaaaaagctaaaaatatcacataccaaagctgcaaattatttctttaattttgagcgacgttaatccacatgatctaaatcatacattctcacacattctcctacttcaaagctttccctggttcctattaccttctgggtaactacctccacccacgccatgtgtaagacttgtcacatgccctcctctgtgtccaggcccatctcccctgcctcagttctggccactgctacccagcattcatccagtgcttgacctgtgttgaactccttggctctctagactccagtctcaagtttgcccctctatgcttttgcacatgctgttctcttcctggaattcctttctccctcctccctttactcctgagaagttttctttatcctttgcgatctacctgcaatgccacttcctctgggtcagatatgagaggggctgacttcctggtggagggagaaatttgtagacaagatttataatctcattaggagctgtgctctgaggggctgcgaatggataaacagtgaggtggtggtcaggtggtgtttgggcttcagtatgtggaatagctactatgcagcctggtgcaaggaagatggagtgggacagagcatcctggtggggattttcgagatgtgcttctcagacatgacaggttacttaacctctctgggcctcagttttctcatctgtaaaaaggggtggaatttaaggagagcagaagttaaagcttatctgtcacatccctgataaatgtctctgtgctgctgttctagctggttgaacctcaaaaatgtcccagtttagacaataaattatatggtcacccttctgagagcagtaccctccacacatgggtgccgtaaggattcagcatatgccgttctctaacatactaatagcacctaatattgtattatttccattgatatctgaactcagtatagagatgggaccataagcgatttcccaggatgatgtgcttggagcatgacacttagaaaaaagatcagaggacttttctgcctcttcagtgttcaaacccaggcacagggactgtgtttggctgctctgtttggggccctgtgggaggaaacctgtgtcctctctcttgctctgagtcaacagacaactcttagaagtgcctgaytgagcctacaacatggaaatgccatttcctccaagccgtttatctgaccacctcagcctggaaagtaacagctcttgacttcccttctccacctgggatcagatgacgacaacatttgaaacaaagggtctgctctctttctcagtatcacacctatggaatcagccctgattcacacttcaaacccactacttcatgaagcaaggtcttgccagatcccctagagtgaacaggggattctttatcctctcacaggcctggcaccgtggtrgcttctgaccatgacagctcctttcactgaggctgacccagactctgccaccaagtgatggccactccttgggctcccacagccagggttcctgacagcttccccagtcaccaccatttcatggtttcagtttgcacaatgtcctctttggggtaaaggggaggacagatgccaacagaaaaccctcagtacctgccttggtagaatacagccttgtcactgtgtcctgcatcctcctktccttgtttgggtgcctggtgaagtccttttgttcaaattctaatagccatggacctctgccagctcccagaggccctgagagataagcagccatgtcatgagaagcatttggactccggtagcctgggaaataaatgaggactgactgggcagagaagagcaagggggcgatggccacagagtccttagccagccaaggaaatgacattgttggtcattggccggggatgcttgggttgtctgcaacacatgaaaaaagcatcaygtccccttgactttgagcaaagagtgcggttaaaaccaagttgtgggaggatggatagtcagtaattgtttatctgtgtgatgagataaggtagtcccctgctgtaatgaaaatgcacagacagttcatgaagtgaggaattagcaactaaggacaacctgagtgactacatgggccaacatcctcatgtgtagatgaggaaactgaggccctggagacccaaactggcacggctgttagcaggcagagctagggctgaagccaggactattgagtattcatcaagagcgtctgtaccacagaacttcactggggcccggacatgaccttggacaagtcgctgaactcggggacctctgtttccttatctgtcagctgaggccacaaggactgcatgatctcgcagctgccttccagaaacaacattccagaatgctctgttccccccttccagcccaagagactgtgcagaataggcctcttctcagtcagcaggcacttttgtctcccatggtctaggcaggagtcatttttttttgctacagtggtggaaatgggtcaggctggagaatgctgaggtttccaggctagtggtttcttcctctgaccacagtaagaggaaaggaagctttccctccacctctactcctctgtgactcctgccccagccccatcctcagcttccacctaagaggtagtgcaggaaagtggtgataagcagatgtctgcagctgtgtgacgtgtgtcccagcccagttctgtggcctgctacctggggagcctctggttgtmattgggcctcctgttgcctctcagcttgcctccmtctgtaaaatggggacagtaggccaggggctgtggctcacacctgtaatctcaacactttgggaggccaaggcaggtggatctcctgaggtcaggagttcaagaccagcctgaccaatatggtgaaaccccatctctactaaaaatccaaaaagcttagccaggcatggtggcgtgtgcctgtaattccagctactggggaggstgaggcaggagaattacttgaacccaggaggcagaggtttcagtgagccaagatcgcaccactgcactacagcctgggtaacagagcaagactccatctcaaaaaaaaaacaaaaatgtggggacagtaatagcacctgcttcagggaactgctgtgaggactgaatgttaatgtgtggaaagcaccgagagcctggcgtgcagtaagggccatgcaagtgttaggtgccgttgtcatggctgtcacattggtacctgttcaacacacttagaggaccgcctccctccaccttgatgacccttggtaggtactgagttcctgagttttagctgaggactgaaggtgtgactgcaataggattagctggtctgaatcagacttatgtagcaccaggcaaccttcaatctccttttgaaaggggaccaccctgaacctttcagaaaaacgttgctttccccgattgaagtgattcccatgtaaccacagtcgggagcacaactggccaagattttcattcaccgcagactcagtcctcatttcccctttccagatcccaccaggggcagatgaggtgtcacattgcatcacatcacgccatcgccattaccctgttcacaggccaccccagaaactcccggcgggagacagaaactaacttctgagctgtgactctgccccttggggttgacactgaggcttaggctgtttctcactcgcttgccctgcctttcccagctccctgcccctctccgctggcgtcttgtggccagatgacagtgctagctcttcacacctgaagcacattagcaacactggctgggctggagctctgctcccaagcttcctctccctgcctagaaacctgaagcaccgatgtgcagagcaaggaggaactctgctcccacgcctgattttaatgagggatggatgcatcctgcagggctcagaggttctgtttctctaaacccagaccaaatgtgtttgggtggccaggcctcgtaatctcagcagaggaatgtgcatgccacagggctgcagaaaacagtttccagcggtctgtcagcagatgtccactccagaagacagacagggaatttggagacctacaggctttggagtgaaaaagtgatggatattaagagcacaactacacacattcggattctcaaacgcccaataaacataaatattttccatccacaatgtactatatatgcctaaatatagggcaagccccaaatagcacatcctccatttccctaattagataaatttaactctcttttttttttttgccaacttaataggaatcagaactatgattgcctttgaggtggggggagtgggcagtgggaattgactggcaagggactggtgggaactttctggagtgagagacaagttctgtactttcatgggggtggtagttactgggtgacataattcatcaaactgcaccctttagatctgtggattttaatgcctgtaaatttacctcaataaaaagaagtttggagaaatgaagaaataatcaactatctgtgtataatgtttaacttaatcatgtggttgaatgcttaaaattttataagaatgatatattaatctataatactcttcattcttatgtttcacacaataattttatccaagtgtgcatcttctgagattgatgggtttcatttctaagccacatttttagtcagcagtttaccagaatatatcatctacaatttgcctaatttakttgaaatgcagaacttcttgaatccatgttggtgctgaaatttgattggcacacaccaacgcccacttgcgtagcactgcagcagttgttttcctcatttgtcttgcaagtgaatattcatgctgctccccacatcaacagcttacgtattgctttctaaaatgggctttcaaatatttattgcaactttcaacaattgaacccaaggaataattaccaaatcttcattaaagctcattgcctccttcccattgtttccctctcgtgacctctaaaatcgtccaracctgatgttgattgagatcatttcaggctagtgtgttttccccaaatgttgtcgttcaaataaagtaattgaggctgggtgcagtggctcatgcctataatcccagtgctttggaaggccaagacaggcagattgcttgagctaaggagttcgagaccagcctgggtaatgtggcaaaactctatctctaccaaaaaaaaaaaaaagaaaccagcaaaaaacaaaacaaaacaaaaactagccatgtgtggtggcatgtgcctatagtcccagctactcaggaggctgaggaaggaggatcacctgagcccaggaggttgaagctgcagtgagctggactactgtacttcagcctgggagacagagaccctgtctccaaaaaaaaaacaaaaaacaaaaaacaaaatttccaaattaytagacacttaaattttaaaggacagtaagtcccaaactgtgagaaacttttataggcaacatcctcttttctaatagtttaacttgaggatataaaccttcaccttatttattttcagacatatatagtaaatcctggaatgtattcagatcaaagataaaatagagataaatttagcaaattttggtggtcttgttttataattcactattaatagattagcattgttagctttagtttatttgtgtagcaaaaactgaccaatagaatctaattaaactgaagagcttctacacagcaaaagagactatcaacagagtaaacagacaacctacagaatggaagaaaatatttgcaaactatgcatctgacgaaggtctgatctctgtcatctataagggacttaaatttgcaagaataaaacaactccattaaaaggagggcaaaggacatgaacagacacttttctaaagaagacatacctgcagacaacaagcatgtgaaaaactcagtatcactggtcattacagaaatgcaaatcaaaaccacggtgagataccatctcataccagtcagaatggctattattaaaaagtcaaaaattggcctggtgcggtggctcatgcctgtaatcccagcactttgggaggccgaggcgggcggatcatgaggtcaggagatggagaccatcctggctaacacggtgaaccccatatctactaaaaatacaaaaaaaaattagccgggcatggtggcaggtgcctgttgtcccagctactcgggaggctgaggcaggagaatggcttgaacccaggaggcggagcttgcagtgagccaagatcgcgccactgcactccagcctgggcaacagtgagcgactccatctcaaaaaaaaaaaaaagcaaaagtcaaaaatcaacagatgatggagaggttttggagaaaagagaatgcttatacactgttggtgggagtataaatgtgctcaaccattgtggaaagcagtgtggctattcctcaaagagctaaaagcagaactgccaattaacccagcatcccattactgggtatatatatacccaaatgaatataaatcattctaccgtaaagacacatgcacatgaatgttcattgcagcactgttcacaatagcaaagacatggaatcaacctaaatacccatcaaagacagattggataaagaaaatgttgtacagatataccatggaatactatgcagccataaaaaagaatgagatcatgccctttgcaggaacatggatggagctggaggccattatccctagcaaactaacacaggaacagaaaaccaaatatcacatgatctcaatgataagtgggagctaaattatgagaactcatgaacacaaagaagggaacaacagacactggagtctayttgagaatggaggttggaaggagggagaggagtagaaaaaataactattgggtactaggcttagtacctgggtgatgaaataatctgtaccaaaaacctccatgacacaagtttacctatataacacacctgcacatgtactcccaaacataaaataaaagttaaaaaaaaaccaacagcaaaaaaagtttttgttccctaccatgaataaaaagttgaaacattcttgaacaactatattttactcaagggcattatagacagggcaatttaacagatgcctgtggttagccatgggattgtaagcacaattctaaattatgaattactaattattaattttctggtttaacctcacatcctgtccagccttcagctacaaccagtgtgatatggtgatatataaagaagacttcatttttctaacagttcctcaatttaaacatcagaaagagtgctgtycttaaggaaatcatcaagaaagactaagcaccattgttttgtttctgatgttgctgtcactcagcaccgttgccattgctgtcagaagcaaaatcaaatcactcaccaagagctcggcaagcatgcaggtccccgtctggctcagggcagagactggtcagttatttttttggtagcaaaactctggctttagagttggaccatgagcagtcctgcttgctgctcattccctttctctagaaggacccctawggagttttacagcaccgtgggggctttctagaatggttgaaaacctctggcagcagatcatccatcaggcttggtcccaagttccagacctgggttcttgactccatgactgttggccagtgacctaagttcagtctcattttcctcattcagacaagaattgcttgtaaggatgttcttaagtgtgctttcaaaaccatggagtataaggcttattttactccttaagtcttcctrtttcctagtcacatctcatttgcatgttatatgccatctcatcaattattgggggacctaagatccacatttyctattatttggccctgttgatgctacaacttctgcctttcagcttttcagccattgttctccacttcaaaatggacaaggaggaaaggtgaattggggttctaccactcctscctctacaataagaggctccagcatcatgattcattcttgagaatgactcctctgacaggcctcttttcatttgcaggtgggccaagagaagggaaactgctctttccagaaaaacccaactccctgcatcatccctcaagaacaagaaaatatcttccacacaatatttgcttttttcacaaagtctggaagaaaagtcttggtaaggatttgtttagtggttggggtaacacgggtggtcctcactcggaagacaccagttttctatttgatatttattatttcctaaatctggttttaatcaatttgacttacaaaggcacagactgtggtcaactcctaattttcagtctgaggtttcaatcaaaatgttaaatttacattccaaatcctattacctggaaaagggataaatctttgcaacccaccaagcacaaagtaaaatgtttcttccactagaatgagtctaaacaagagtgattattcttgtgcaaacattttgggaaactgtttgataatatctactaaaacaaaacgtgtgtatcctatgacacagccattctactcttgagtatatccccaagaaaaatgagtacttgtgcttcccagaaaagacatgaaaaaggatgctcacagaaatgttaaaatagctgaaagctgagaacaatgcagatatccatcaataggagaataagtaagcaattgtggtatatccatacactggaatattacacagtaatgaaaaataacaaactactgctaatgaatgaatctcacagacagaatatattgagtggaagaagctagagacaaaagccacatattgtaatatttcacttatacgaagttcagaaatagcaaaaactaatcatgatgatagaggtcaagaaggtggttactttcagaggaatgtggatgggatggggcatgagggagcctgcttagatgctggaaatgtcctacatcctaatcagggtggtagtcctccaggtataaacacatgtaaaaatttttaaagacaggccaggcacggtggctcatgcctgtaataccagcacttagggaggctgagggggtggatcacctgaggtcaggagtttgagaccagcctggccaacatggtgaaaccctgtatctactaaaaatacaaaaattagctggatgtggtagtgggcgcctgtaatcccagctactagggaggctgaggcaggagaatcggttgaatcagggaggcagaggttgcagtgagccaagatcgtgccactgtactccagcctgggcaacagagcaagactctgtctcaaaaaaaaaaaaaaattataaagacacacacttcagatttgttctatttactatatttgttacacctccatttttaaaaagtgcaggtattgaagatggaatgacaatgcttttccaaagcctccttttttttatctttggttacatttctctaagctccttatttcagccctggcacatctcacctttatcatttcctttctcattcttttctcctgttggagaagggtgactgtttgccacttgaaaggttgggtttttttttttttttttttttttacttacatagtgagggtgatattgttgaaagcccttagacttgttagatgtagtgatacctagtgattttatagttacgactctgtctggctgaaaattttgccgtatagatgaaacatcatcaaggtatgtatacgcattttggaacctatcatataaaaamgaaaacttttgtaacttaaatttgggatttatgttttyggytttttgtttgtttgtttgttttgagatggagtcttgctctgtcgcccagggtggagtgcagtggcatgatctcggctcactgcagcttctgcctctcgggttcatgcagttctcccgcctcagmctccccagcagctgggactacaggcggccaccactatgcctggctaacttctgtattttttgtagagacagggtttcaccatgttggccaaactggtcttgaactcctgatctcaggtgacccccctacctcagcctcccgaagtgctgggattacaggcgtgagccactgcgcccagccgagatttacgtctctattgtaacttttgtgttttcttgaggaagtgtcacatgacttcttagccctcttattyacctacctaataaataggcatgaaagtatatttgccactacacaggtggaagtcacataatgtaggaaacgtgtctgtgttcaaaactcataagaatgctttcagaatgcaaaatttaagtttgtgggtttaaaaaaaaaaacaattatttctctttgtgaattcatccaattcttggtaggataaattagtgagctgttttctcccagttgcttgacttaaaggcatgctctggttcccactgggtgggaaatcccttgaatgccctctggtggcgagaaagaacgattgcatcttcttgtggatttcctctgcctggaattgccttagtcaccaagttcatggagcccactactctgtaaattgttgtggatttgtctttgttcttaattccattggaaatttttctgacttttcttctcaggactgtgaaaaaccaggaatttcttgcctaacagcacactgtaactttagtgctcttgctaaagaagaaagtcgtactatagacatttacatgctgctgaacacagaaatactgaaaaaggtaagccctaatgaaccgcacttgtggatgcatttagaagcatttgaattgttgacatctgattttgggtaaaaaaaaggaaaaaggaaagcatytgaattggtgtcctcatgacaatctggctgcccccccttttggctgtctacaagagactgtttttatttttatgtatttagggggtacaagtgcagacttcttatatgaatatattgtatcgtgatgaaatctgggcttttagtgtacccaatagtgaacatggtacccaayaggtaacttttcaaccctcacccccctcccacattttggagtctccaatgtctgttaattccactctttatgcctatgggtacccattacttagctcccacttataagtgagaacatgcagtagttgactacttatgagttatttcacttagggaaatggacttcatttccatccatgttgctgcaaaagacataatttaattcttttttatggctgagtaatattccatggtgtgtgtgtgtgtgtatatatatatataccacattttctataaccagtcatccattcatggacacttaagttgattccctatctttgctgttgtgaatagtgctgcaataaacttaccagtgcaggtatattttttatacaatacttctttccctttgggtatatacccattagtgtgattgctggatggaatggcagttctatttttagttctttgagaaatctcgatactgcttttttgattgtactaatttatcttcccatcaacagtgtataagtgttcccttttctttgcatcctcaccaacatctgttgttgtagttgttgttgttgaactgtttagtaatagtctggctgccccttttgaaacttttccagcaagtgccattggtaattttgctggtagataatgccagggtaaaataccagacccttgctactcaaagtgtggtccgaggaccagcagcatcagcatcacctgagagtttcttagaaatgcagaatcctgggctccaccccagacttaataaatcggcatcttcatttttaacacattccccagggattttgtttggccatttaagtttctcatgctttagcttgcatcagaatcacctggagatcttgttcaaacacagattcctttggggtgcagtctgaggctctccagttgccacaagcacccaggtgatgccagtcctgcagtctagggacctcgctttggatgaaggttggctaaccttttctgtaaagggccagtggtaaatatttcaggctttgcaggccctacagtctcttgcaactgttcaactctgccattgtattgtgaaagcagccatagacaacactcaaataaatgggcatggctgtgatccagtaaaactttataaaaacaggcagagggccagatttgacccatgagtcctagtttaaatgacggtttgttttggtccaacttttgaacctcaggtcactttgctattatgagtttatcacaggtggttcattaaaaaaccacctcaaccagtgcatcggtggctcttgaagaatcatacaaatttcctatgatttattttaaggtgagagctgctgagaggccacttccaacaagttgctgtaaaaataattacatgtgaagataaaactaaatatgcatgttagcctcagagattccaattatttttctttagaaagactaaatgtgttaatctgtacaaacctatccacgtgtgaatgaataaccttagaaaagtcattctgtggttatttttaaataggcacagaggtaacacactgacctgagaggatgcaggcatcaggggatgtttttccattttcaatctgtagccgttacagccctcacacacctgaagagagctgtgcatagttctggtttctctggtttgctctggagggaaactggtttggggcaagttggactcacactgcagtgctttcttctccctttgtacctctccctttataaaggacagtgttggaggaggaccaggcctgacttagagcaccactggccatcctctgattccataagggaggctggaaaaccccacgtctggagaagtaccttcctgaaatgtgtccgcaggccaggctggaggactatgcctctgcatatgtacctgtcctgtttgtattcttcaaaaatggtgctgcagacagttttatngcctgtgccatacttgccactgtccatagagccctggtgacagcactggtggctgtaagccactctgatgtttcctttatcctcaacccagatggctgctgcttgcacttcagttatttgcacttaatcatgcacagctctgcagcctggttcttctgcttttctatcccggcagccagtggtgaccctttgccaaggaacatgtcccagtgactactgtccccatgggccagccaggccagtagagccgcaggcaagagagctgaaagctgtagggtgtcatatgaagccttcaaggctcattctccatgtgccctttcagcagaaaccaggagcacttccaggtgcagagaaaagcttagaacaaagttgacctggaagccagatggggccccagctgctcccagagcttcagttgccctgaagccagctacagcctcccttggggagtggagcccacatggctccaggcctcccgaaggatgtggagcagcgccagccttgtggtttgcctgggcctgcagtcgtgtttattttccttttgacctcaagatctggccccagacaagggaatttgaggttttactgttttgaccttaacaagttttcatttgaaatgtaggatctgatttttaaaatcactgtaggagccgggcgcagtggctcacgcctgtaatcccagcactttgggaggctgaggtgggcatatcacaaggtcaggaattcaagaccagcctggccaacatggtgaaaccccatctctactaaaaaatacaaaaattagcctggcatggtggtgggcacctgtagtctcagctactcgggaggctgaggcagaagaatcgcttgaacctgggaggtggaggttgcagtgagccaagatcgtgccattgcactccagcctgggcaacagagcgagactctgtctcaaaaaaaaaaaatcaccgtaggattcggatttttttggaagtattcttctttcagtctgtaaggcttttctcactgattctacaaccgtgggggcccatcctgtgccagactcctcgtctgcttggcctgtaacgttggcaattatcatcatcattatcgttattaatatccaagtttatttttattyattttaatgtttttatttaaaaaaatatttttagagacaggatcttgctctgtcacccagatgggagtacagtggctcaatcatagctcactgcagcctcaaactcctgggctcaagtgatcttcctgcctcagctagtcctcagctaggactgcaggcacatgctaccatgacaggtgaatttttttttaatcttttgtagagataggatgtttccccaggctggacttgacctcctagcctcaagtgatcctcccacttcagtctctcaaagtgctgggattacaggcyttaaccatcgtgcctggcccaagattattrttattattcaagattgaaaatacagcatatcctgatacataaaaccccaactttataaaactgttaaattggtaaaagattatttgttgcttaaaattatttcttgcttaaagtgagttaactggagtaactcttttgaatgacaagcttcccaaaagcatttaaaatgtgtcttatggttgttttaagaaaagaatgataattggtgcataactcccaagtcacatatacagaccagggtccctgtgtgccccaggaaggtctttgtggkttctttggcagagatgagcaaagggtacccttggaactgttttctgtggagtcctctaccttcctgtttctttgagggtttaaccaaaggtggcatttaagtgtaagctccttgcatgacaggcaagctgggtagatgtaggtggggacaccacargacaccttgcctgtggagcccctcctgccccacaggtagaatgttgaatgcactagttctctgctatctgtttccacgacagaagccaggctgcccttctgctccacaatcaacctgtaccactggcttgaggttctggcttctccccagaccacagtttttccagtccctgtcttcttccaaattctttctccatccctgttttggcgccattttctggttatctggatcagtgtctttgaatctgagcccacaggaagacctctgcctgcctctggctggggggtgattccagagtcttagctgtgctcccttatacccctgcccctttctccttaattcataagccagatatttaccccttccccatctctccatcaggcatcctctttcaatgtttaatggttttgattccaaaatgacttcatttaagagcaaagaaagagttaaaagcaactcatatgaagggtttgagggttgtggtcaaggcaggaagatgcctataaaatgtagatcagatgccttctgtggaatgccaggcctagatttgctctacacaattaaacagctttatttatcctcaactctttgtgaacatgtcaatatcartatccaaatatctggctctaactgcttggaaaccacagcacacatcttgcgtgtgttgattactggcaaactccatcatttcccaccatccaccatgatctgcaaagaatccttaagagagaccctagtctgtgtttatgtgggtgcctgggatggagaggtatctagttcaatgataaaatttttgtctgggctacatggaatcatggaatttcagttctgcccagtccctctcaaggcccagccattatcatagaaaaatcytcaagtaagttgtgttgtttcttccacaggacagttcgtctgtcatccagttcatgtcccgcgccaaggtgaaggtggatcctgccctaagggtggtggaaatagctcatgggaacccagaagaggtgacggtgagtcagccaccccaggacagccctcctcagagggcaagggaagctgggtgacttggagacctggagctggaatttgagggtcaagacagtctctgagccaagatgttgggtttgtggcagacccaagactatgcctgccttggcttccargccccccctggagaacttctgtggttcgttcttgtgatagcattgtcctttaggatgccatcattatgtgaatgtttcctgctatgattgtccaaagggaaaatggtctggaagtacacccaygtcaacagagttggatttccactgtggagccaggactatttatatctttcttagacctttcctaagacagaccacatctgccttacccgtcacattactccatgggtaaatactgtgttttggtttggtttggtttggtttttaagagacagggtctcactctgtcacccaggctggtgtgcagtcataactccctgtagccttgaatacctggcctcaagggatcctctcaccttagcctccagagtagctaggactacaggcacactaccatgcctaatttttaaattttttaaaatttttttgtcgggatagggttccacgatgttgctcaggctggtctcaaactcctggcttcaagcgatcctcctgcctcagcctcccaaaacactgagattacaggcaaacactgggtgttttaaaaacaagttgtttgaatgacttaaagagattacatccaaattgccaagacctagtaactgctctttaactatttaccaccccmttctcctccataaagtgcagttggcrccaaggcctcagagacacgggagggtgtggcaaaccacgaggctgagagtggaggtgtgggagaggctggagggaagctatggccttggaattttattgccttttattgttgttcttgcaggagcaggggggttgaggggggttcatcctgtatttgaygcccacactcagatcccaggggagtagaggaggagacagcagccgatgcacttcttttgccagtgagctgtgcaatgatgctacctgtctgcttcccttctgtggaatttaccctctcttagaacagtcagtgttgctgtgacacatttacaaaagtgataagtttataatgattttgtgcttagaaactgttgttaatttactctctgacaacagtggagacaccacatgtcaaaatgtcagaatggggttcaaaccaaagactactcttacaagaccctggttgggaaagtttcatatagaaaataaatgctgggcaggcggatcatctgagatcaggagttcaagaccaacatggcgaaacgctgtctctactaaaaaatataaaaattagccagtcgtggtggtaggctcttrtaatcccagctacttgggaactgaggcaggagaatcacttgaaacccggaggcggaggttgcagtgagccaagatcatgccactctgctccagcctgggcaacggagtaagactccgtctcaaaaaaacaaaaaacaaacaaacaamaaaaaaaaaaccaatagtaataatgcttaggacctcaataaaacttcagtcctgtccgtttttggtgagcaagagatgagaacatcagggagtctgggatgaaaatgaattcctgaatgagtgaggggttgggcattccctactcagtgaggagaatgagtgttccatgcagacttttatgctctacccacaagataagttgtccaagcactatttttgtttgtttgtttgtttctttgtttgtttgagacagggtcttgctttgtcacccaggctggagtgcactggtgcaatcatggctcactgcagcctccacctgttggctcaggccaggcactaattttaatgatagaaaccaaatggaatgatgctgggtcatttactacttagggtcagtttttctggcaggtcagatatttggagttggtgtttcccttttcttccctgccttctggccatttaactgctaattcagacctccacctgggaagtgaaaaagaaaagtggttccctgctcattgtcatagttctggtttaaaagttttatagaatgaaatacttgcccaacatgagaggtttagaatgttctggtaaaccacagtgttaataagtggaagctaatggaaatagctaacaggttttctacacgtagaatcccttgtgtagatgaaaaaaaaaaatcactgggcatattgccttccattataggactagactgtgggatccaggaaaatgttgcttaacatctcgttgttggattccaagtcatctgtactcccccaaaataccacttccawtaattactgttccattttgagcactatggtgatattttcattatcaagagttcttgggaagaggccgagaggttttttttagcactcctaagaaaaaattaacacacatgggaattccacaatgccccttctccctcctttccatgactttgccttttcagtccatgagctacaatgaagttctacaatctgttgttctcaattttcctggcaggaaaaaaaaaatcttttctgagtaggaaggtttgcctttttagaacaaacacgwtcttccctgcgtgattcttctgaatgcctggccttctgtcaactatcagtctgaaggggaatttccatagagcctcgccaccaaatttaaattaggcaaagtttcaaagattttagattaggcaccaaattgttatggccttggaaggaacaggaaatgtacttgcatttggtatcgagtgggggaggaaaacaatcagatttttaaccacataacgtgtgcacggtggtaaatttaactgatggagaaatcaagcaattttcctgtgatcttttttaataggagttttaaaatgcattttatattgagtagttatttcatgttttcttaaaacaattattgtattgaactaaaaataaactaggtagtttgttcacataacaaatctacattcaaagacatgcaaacaaattttccacttagtccatttttctgttctcagcattactacaaatgcctcattctgttatcacgttgaattcttcagcatcttctatatcatttccagggcatctctgggaagtagtgatgcctgtcttccctcagaagcacactgataaccccaatatacccacaattcacacttttttccttctctgaggtatgctgttttttgkcaaaacagaaaaaacacactactaggatatgaaaaacttcattctgggcctggttaggtcataaactacagaaccttaggtcatatattctcaccgggcgcttgtttctccactgcaaaaaataattcgtatttgcttggtcctttgtagtactttactgtttataartgtagtacatttatcttcatgatgacccttaaatttaagtaaggtagtattatgctcattttatagaagaaattcaatctcaaagaggatacagtctcccaaagatcccacaagcagtaatatattaggcagagctaaactcacacactgtcactcaatwtcctaatattggtacatgccatgctaataagtgtgctaaaatggatgaagcggcaatttctcaggtcccttccaatgatcctgtcctctgcttctacttgatattttttctctctttcaactagcattaacatccgaaactgtatatcatcaccacatttcatttaccatggttttttaatttaattattctttaaattttyctatttccatgttaaatccagagaaattgttactttttggaaagtttctactgctgcctgcctctgaaggccacgggacttacctgtttgtttgtcaaagcagaaatgcccaacattttgtaaacactaatttttttataactgtaaagatgattattccatacttaaaaccaattcaaaataaaataaatcctcaatactycttattccctggggtagtaattttaattagattctattgattcattattttctcctgtgtgcctttatttgggaaatactgttagtttaccttgctatcgagtctctttccctaacaagaaaatgtcagccttacgagtcaggaaagcttttactttcactatcacatatgaagaatgaactaaacacctaacttggaaagtaaaacttaaatgagggattcaggacatttcccaaggggtcatctgaccaatttaagagttggtatgatgtgcctaaaatagcaaattaactcttctacttataataaaggtgcagatgtactgattagacatgctgacatgtacatataaaatatgcctaaaccaaattaaaagaaaacaaaatatattccatggcaatcttgaaaagtcagggagctcaatatatattaagagtatgcgctcagccaggcgcggtggctcacacctgtaatcctagcactttgggaggccaaggcgggtggrccacaargtcaggagatcgagaccatcctggctaacgtggtgtaaccctgtctctactaaaaaatacmaaaaaaaaaaaaaaatgagctgggtgtggtggcggscgcctgtagtcccagctactcgggaggctgagacaggagaatggygtgaacccagaaggcggagcttgcagtgagctgagatcacgccactgcactccagcctgggtgacagagtgagactccgtctcaaaaaaaaaaaaaaaaaaaaaaaaaaagactatgctctcacaatgagagcattaaacatttggtaattaacataatttaatatgccaaaaatgagaaaatagtcaggatgagggatgaggagtacacataggaaakttttgtgattttcttcattttgattgtattgctttcttgtcttcaggagggaagattttgacttcaaaagtaacaaaatatttaagaagggaattcacatctttctgttctaattggtattcttgcgctattttctcagcagtccatgtttctggataaagtttatgattgttaagaagtgtcagtgcttctacaatggaaattttgcctttgggaatgctcttaatatttatcatatcaaagtgatgacctttcagcaatctgaattcctttggctcttgatgtgtttcagcagcttttacctgcgcggaagacacaagatctttggaatcaacatacacatcttttagaaatggcagcagcttgtcatctttatgagcaatctctcccttaatttctggatagagactaatctgctctcacaggagkctgttggtagaggggtgcctgggagcaggagagggcttcatcttgctgatttcccattctgctcggttctctcggttggaatgcctgatcctgcgagtcactgcagcccccatctcataacatgatgccctcaggtttacgccacttgtgggaacactggcacaggaagcctccagggcgtctggagcatgcacacatgtcctgtgattctttatatcttttatttttatgccatggtacaagttgtgctttacagagcatttgggtgaataactagaaatatrccatagattcttgaggctttgcctggttcactaatgacaggctccagggcgtttctcagggagcrtgttagcatgtttctaggaccagccacatcagccagacctggctctgtacagacccaaacctgagaatgccatgtgagacctgtgtgactgcagaatcaaagtgctggttgcgaggtgccaattacatgttgaatttcatcttcaacccaactctacttacctttcagggagtgatgagtagggggcgagaggggaaaatgcagaaagtgttgyttgaggcccacagaaactataaagatgaagaacaggagaaacstagttaatcatgccctggaaagctggcctgcagaaagaaaaggaatttatctctgagaaggccttcagaaagaaaatgagtaggctccggagacgttcatctgtcttcgtgcagccataaaaagttatcaggtgaggctgaggggtgaaggcgctttctctgatccctgaattggttactgaggcccacagaagaggaaaggacccctgaagccagaaactcccccaaggcaaatcaagactttatggaatcagctctgttactgcaagacatcccctcaaactcccgtctcagtctgtgtgagaascgtgcatgaattcttgctattttcttgatattttcaaatagcagaatacatgataaacttgtaagtccacagatgagtcggtaagctgctgccatatggagcatgcaccagactgaggtctttggtracagctggaaagactggctctgtctcatttcagcagaatcagaatggattcgaaggctatccagtggaagtgctcagaattgcgctggaaggctggagaaccagaccaaaaatcagagggatctggaaacctgagggctataggctgcgtccaggcgcaggaagtctggcatggtgtcctggacactggacacagctatccctggcttctctctacctcgtgctctggagtcaggcagaaacctttctactttctggagttgctgagaaggttcagtgataccagcatgaagctcctagaagaagggctggtgcatagctgctgctcagggtggcacagcccctccacagtcctgcccacatgtgagttgccccttcacaccactccctaacactgccctcaccaaagatgcaagcctggtatctcaaccagagaggcatctttcaacatggcaagcaagattactccaaaaaaatgccacttaccatwcctttggtgtactgcytctagaggcaaagtttacygcttttactgtcatgaaatagactgtgacttgtkatttatcatttatgtgaccaattatagttacaatcatgttccatgtgacaatagaatctttccccccttgaacctcacattatgctgagatgtaggatgaagaggagggttgttgaagggtcatcaccgcccccatcctatgccatcagcagtgggtggtgagtagttctttctcttcacccacctccccacatgtgagaattaagctctgaccatcaagaattgagaaaactctcggtatagttttccaaacacacgagtcatattttctaatggtcatcatttgcttatttgtttgatgaatatttattgagggcttgctaagagccaggcactgtgctaggcactggggactcgatggggaacaaaagagacatgatccgtgccctcccagagctggccgagggggcagcagtcagcaaggasgcaaacaagaattctatttccagttgaggttagtccccagggagtagcctgctttagattgggggtcgaggaatgtttctacaaggaagctgagactggcagatgagaaggaattcgcttgccaagcatgaggaagagtgtctcagttggggaggagagctgtatggagccccaaaargcttggcctcttcaaggcactgaaagaccaggtagcaggaagctggttagcagtgaagagaaccatggtagacctaggcagggtccatgccaggtaacaccactgggcacttacaaaggaaagccattgaaagcttctgtttggagcagggaatggcatgatccagtgtatgttctttaaaaatcgtaggccactgtgtggatggtggattttaggggcaaaggtggaaataaggagctggttagaaggctgcgattttcacctggcaagaggtcagggtggcagaggagacagagcaagtggacagtatgtctatgtcagtgaaggtgcggtgaccggtgccactcacacgtaaggaatgcttatcctggagggctgggagtgatccagtgtcatctcgatgcaaagccccttgcacagcacatccacggtggcactctgttaatagtggctgtcattgcataaagagatggccaaggagatgaaccacatgaaaaatgagcctccttctccccaaatcctcaagtcctggtcagtttactctaaatcaaagtttccagtcgtcatgatgagtatgatcatcatcattattatttttaggcaacagaacccatttctaaattgaaatatgcttcagttgactcaggggtgaggttcctggaactccctcttggtggcttccataccccctcactggacccgtgggctctaaagaagccactgctatggaaagttgtattctcagaaggttgcccagtccatcaaaggctttcactagatgctagttatacccccagtaactatgaacaagatgaaatttttaccctcaagacttccacagccccaaacaggtcaacacacacacacacacacacacacacacacacacacacacacacacacgtgcacacacatcacacccctgcagcactgtatgcatacgtgcccagagtatctgtgctgaagaggtcaagacaggtttcacagaaggagtgacccccgaacaagtattgaaggaatttcccacgtggacaaggaagatcaggcattcaagatgaagtcagatggtgtcttgggctggattctcaagaagcagaccctgagatgagggcatcatgtaagcagtttatttagggagatgctcctaatgagacccagaaataaatgggacaggataggaaagaggagaagggaagcaagggtgagatttcagggaccatcttagctccaccctgatcttgacctcggagttggtcctgcctggaagcaggggagctggggtctcacactcctgtatctgccagtcattggttggggctgttccagaggtagtaaccccaagccactttaccctctaaaagtgaggcaggcctctagaagtgaaggcatgacaaacctgggggctgggcaggccaaatcaagagaggggacccaaaaggatctgggcagagaaccgagtcttggccacagatggaaatgttctgcactcagagcttgggtgctgtgctcagtgtgcgtgtccatgtcccattaagatgaatgacctcattgtgtgaggtgtgctcgaatctgctgaattcctgtgaagtgctaggcatgtgctatgattacctcctgtcactctgacatcacccctgtgaactaggcactacaacttccatcttctttggaacagaggctccgggagtgaaggagcctgctggatgccccacagccggtcagtggaagaggaatttctggccacagctctgcctgttggcgagccctgagtctcccttgaccccttacccctctggcctgtgctgtcctgtagcccagagcccacacacagagcaggtgggaggaatcgcattcctgggtggtagacagctgaccctctgtcttaggagtgacccttggctctaatggcctcaggagcacatcatgctcagacttatttggtggtcagttggctttggaactcttcccattgtgtcctggtccttaactagatgcacagatgtgcagtcaaggggagaatgaagactcctcgggattctccatcgcttgaggtaaatgagctccatccctctctctctcaagagcaatgtgaggattatggggagtagtagatagtaaacctctcagcatggtgcctggtgcatagtaagtactctacaaatgtgatccattaccagtaacaggaattagaaagcccagctcattcctctgcaaactctgacagagaaagggattttggaaacatgacacctggcaggcatggggcatgtttgacatctctgttcatcacagcacagacttacagtgccagtcttgccaaatgtacagtttattttctgttcatttatgtcgtctccataagtctccctgtgcctctgaactggcttgccttctaggctgagttctgagagccatctgaggcatggttctgctgaaaacatttattccagccccaaccaccctgtctccctcctccctcccccacacctgcactggctattagatggaatcagaatcgggtggaaatgtcatctcactgtcacagatgttattctctttccacttcttattttatataaattccttccttctattgagacaagtgtgtgatgttgactgcagagagcatcttgcccttgtcattgaccttcagctggcctaggtctggagttgaacctcctcttggatggtattgaccgagctgtccctccgtctctggaagccctccatccagcagaagcctgggtgagatgtactgccattgtgatcatattctcaggccttgtggagacatgggcattgccagctgttacagtaggcatayttgcattgatcagaacataaaagtttccakaaacacagaagtgaatcaaatagtgtggtttaggttcacccactgcctyagactgsaagctggcttctggccactccatgacaccagcttggcaacctcaggtacgttaaattctacagaagcaggcagggtgccagtgtctggacctgtctcaaaggcctgtttgccctcctcaaaggcccccttgagacagatcctcatactccccattttcgtctgttttgttagtcagcgtccagtgtgtgagccctccagccagggtccgcaccaggccatcagccatcccttcactggccagagctcctgccttccccagctcagcctgctacgaccctcacrgccactcccccaaaaccagcagacttctcctcctcctcagtcaatcttctcctttcacaccacctcctttcttactgaaagcgtggatctaacctggggaaaccatttcccccgcagccctctcacgggggctttttccttgtactcccacattcagttatctcttctgacctagattcattttgcagtgtactttgcaaaatgcaaatcacatcactgccctgctcaaaatcctccagtggcttctcattcctcttaaggtaaagcatggagatcttactgcagcctccagctcctgtctctccagcatatcatgaacatcttcccgctgcttcttgttcatcctgttggctccagttcactgtccaatggcagtgtctcacccttgccaagttcactcatgccaaagggggtttgcacatcatgttccctctccttggaatgatcttccctcccttgtttagctggtaaacttctgcttgtcctttcaccttcagctcaaatggctcctcagggaactctgttcactcccatgcctctatcatgaggatcttttatcatcatgaacttctcctttgtagcacttccacagttataatgatgcatttatttttctaattgactagtagtctctagaagctggaagttctgtgaaagcaaagactgcctgttttattcatcaatgaatttccacaatgtctagcacataggagatactgcagacacatttgttggttggttggatggatggatggatggatggatggatggatgaatggatggatggaacgacggacagacggatggacagagcagatggacaggttgattgacagatggataggtggtggatgggcggatggacagatggatggatggccaggactcccccaaaagatataacatttgcaaatatatttttgaaggagagagaaaataatcacactcagagactccacttcaaatcccacatctcttttgttgcaaactgagtcgtgttcatacttcatctgattttatagcagaaatgatgttgaatgtattaatttgtatattcatgaatcatataatgaatcagtgccttggttcaggtgacaggaatgcatgcattcatgtctttattgtatacaaatcacagtttactggagtccgtagacaggaagatttatcattaccttaaagagtgagaaggacctagaactgggactctgaagtatacagctgtggttttaaaactctgttttgttggagccatgggttcccttgagtttgttcagtgcagctgaggtcaggttagggaggaacagggcttagaaagaggggctgggtcaggtgcagtggctcacctgcagaactttgggaggctgaggcatgcagataacttcagcccagaagttcaagaccagcctgggcaacatggcaaaatcctatctctacaaataataataataataattagttggctgtggtggtgtttgcctgtagtcccagctacttgggaggctgaggtgggagaatcacttgagcccacctcaagtgattgaggctatagtataggttgaggctatagtaagccaagattgtaccacttcactccagtctaagcaacagagtgagaccctgtctccaaaaaataaaaacaaatgggggctgagtagtctgggttctagctgcccacctaagaagctccattgtatacactgggatgctataggaggttgaaaatcactatgtttccaagagctcagagaatgattaattctgctgaaaacaggagtaaggcaggcttcttgggaaagcagatattggagcagagtctctcctttaaaaaaataaaatggttttacttgcctttaaaatgctcaatttaaaaaatagtaaaacgtagaaaagagaaataatattcataatatcaaaaaaacacctgtttactttaaagggttcctactgtattgctgcaaagctgaagtcttctacgtattagataatctttttattttttattttttattttatttttttgagactcactgtgtcgctcaggctggagtgcagtggcacaatctcaggtcactgcagccttcacatcctagattcaagtgattacaggtgtgcgccaccacacctggctaatttttgtagagacggggtttcgccatgttggccaggctggcttgagctcctggcctcaagttgatccacccgccttggtctcccaaagtgctggaattacaggtgtgatccaccatacccaacctatttatttwatttwatttwattttggacggggtcttgctctgtmacccaggctggagcgcagtggcacagttacagctcacttcagcctcgatatcccatgctcaaatgatcctcctgcctcagctccccaaatagctgggacgacagttgcatgccaccatgcccagctaatttctgtgtttttgtagagacaaggtctcactatgttacccaggctcatcttgaactcctaggctcaagcaaccctcccaccctggcctcccagagtgctgggattataggcatgagccagcatcttctgattttttaacttagcataataaacatcattttcccacattattactatgttttcaaaagtatctaaaatttggaaatcaggcaaaaagatgattacatatcctttcagtgtcatactggagcatcccctcgcccctttctactcaaagtgtggtccacagaccagcagcatcagcatcatgggggagattatttgaaatctaggctctcaggccccattctagactctaattcagaatctgcattttaatagagttcctcatgtgattcttatacacagtaaaatttgagaagcactggtggaggkcccaaattctgtaaagttacctattaacttacggaaggctgataagttataaatgactcttgccagtaaagataaaaatgatttctgtttgactgaaaatatcccaaaggttagaatttattgccttgtagggtattagccagttttgtatttgatttagtaatctgatttcagtaatttttttcctgtgactacacatttttttctggtctttttaaaactagctttgccaccctgctgacttcctcaataataaattaaataaatctttgccacgtattcactatatatttgtatgagaatcatgtttttaactttttgaaaattatgctttgacaaccagstttctgtcatcatttttaatagttctgtggtattctattttgtgattgaccatagtttacttatctattgccctaatgttagacacttaggatattgctaatttagtaccaatataaataattctgcagtgaacatctttgagcataaaactttttccgtattttatatttatttcctttgagtaagttttcaagtactgaattaatggatcaaagggtatgaacatttttattttattttttaattttttatttttttaagacagagtcttgctctttcacccaggctggaatgcagtggtgccaccttgactcactgcagcctccacctcccgggctcaagtgattctcctgcctcagcctcccaagtagctgggactacagacatacaccatcacacctggctgatttttgtatttttagtagacacgaggtttcaccatgttggccagactggtcaagtatgaacattttcagatgagcaataatgagcttgtcaaatggacaaggatggaagggcatttcaggaggcaagagcagcctgcagagaggctggggaccaccggtctcacagaggagaggcctctaactggctagaatgtaaatatgtgtcctgggagcagctggaaaggcaggaaggagaccagagtatgaaggccctggtgtcctgaattagatgctcagcctaaaggaaagtcatggatactgtaaaccgagaagtgacatgatgagacctgtgccttagaaaaacaactctatcagcaaggaggcctttccaagcctcctgaaatagtgctggtgagagaagacgagatgtgagccaggaggtacctgggatggaaacaagaggatggagagaaaagttgtttagaaaggtgtaggggcttaaccaaggatcacccagctcattggtggtgatgacgggacctgatcatcagtgcttcttgcctctccatgtcgtccatgctgctgttccttccttagagttttgttttttaatctaagatatgacttcctagagctacaggacactcagctcatcactcacagatgagtttgagagttgtgatgtgagagaacaggctctgccaaagcatggagcacgcatccaaggggatgaacagcatccctaaaaataataagagatgaagcccacattccggggaagtgacagggcattcttgtggaacttgacagactaaactgtagctgctactttaacctctgtgtccacaaaaccagacctccaacgtggcgttgctggtatgcagatttcagtgtccctaagaagccatctgggttagcacagggggctgggttttacagctaaccccgctgagctcagtgtctcagtctgattcatagtcaacaataaggtttagcagacttttctcacacccaggtgctttcacagaactgccacatttccctatcagaccgccatttcacagaggaagagaaagttggttgcctacggttgcaccaggaccagattaaagccagcgctcctccctctccatctttcctaacagttcctcacagttcatctgtacaagacaccatgagagattccaaatgcaggaagtgatttgatccacagctttttaagggcaggaacccaaagacatgagtctgtctgcctttaaagatgagagctgctcatttgaactagatagaaaatagtggatttaggatgacagacttcagagcccactctgtcctaccacctcctaccagtaaatgttcttccctgagaattgcctattatctgaaaattgctctttttaataaccccaagctggaaataatctccatgcctatcaataatagcatgaataaataaacagtggtatgtccacacagaggaatactgtacagcagtgagagtggacatgccacagcctggagcaatttcccaaacataacagtgagagaaagaaaccagatgcatgcctgtaatcccagcactttgggaggctgaagcaggtggatcacctgaggccaggagttcgaggccaggagttcgagaccagccaggccaacatggtgaaaccctgtctctatgaaaaatacaaaaatcagccgagtgtggtggcatgcgcctgtaatcccagcttcttgggaggctcagacaggagaattgcttgaacccaggaggcagaggttgcagtgagttgagattgccccaccgcactgcagcctgagcaacggagcaagactccgtctcaaaaaaagaaagaaaagaaaagagaaaagaaatgaaaccaggtactgtagttcatacatcatcattccattcatagcaaggacccaaagaagcaggtgatgctaatccaagctgttagacatccttggtgggggtggggactggaaggaagggggaagggagcttctagggagccggtcaccttctgtttcttgatctgagtgctggttacacacatgcatttagcatttggtatgtgaaaattcagcgagctatacacttaggatacctatacttttctctatgtatattcgacttcaataagtaatttttaaaaagtaaaaagagctgggagtggtggctcatgcctataatgccagcactttgggagctgaggcacaagaattgcttgaacccaggatgcagaggttgcagtgagctgagattgcaccactgcactccacctgggtgacagagagaaactctgtctcaaaaaataaaataaaaactaaaaagtagccagccatgcacaacctcaaaaaaaactccctacaatgatgctaacaggaacactccatttgtcaagggcggactctgtgccagatgctatgctggggactctgtgtgcattaccccttttcaatttctgggaaggcactgttctgctcctgtcttgcggatgagaaaactgaggctcagaaactgtggtggcctgtgtgtccatttgcctcatcccctggcacacgcacacactctcctaccccagctgcgggaatggaggcaatgaagtagaggtggtctcattttctttccttatcaccagggaagagccagtaagtaattcattcagttgacaggtagcctataaagaaggccactgtcaaccaggcactgcagtgtggtgatgacaagctcagatttgggggtttggggttggctaagagctgggttcaaatcgtgactgtgcatttgaactacacaatccagagcaaatatcctctctggacctccatgttcccctctgtaaaatgggtgtggaagacctcatagggctgttgtatgacttagacaagagattgcaaaaaaaagcataaactgacacagacaatattcaataagtgttagagagggatggaagccaggccctaaaaaggttaaataagcagtgctaggcattataacrtcagtattgtgcccagtcactgcttgggcttgagcaaggggctggaccagtgggcttcagcgatcagtgaggcttcttgacagaggatygaactaggtttagaaaagactttcccaaaggggaatggacattccaaagagatggcaaagcttggagaaagacctgtggttggccagcctgtctggagccaaaggagagaatgactgcccagagctgtgatttttttgtcttttgcagtgaggagcttaaatgggacagtggtgtattggggagagttatttggtagcagaagacgcaatagatgctttgaattctgcaaaaccaaactcccctgtgaccagtggggataaagcagagccgaaggggacaatcagaagtgagcactgatacatgtttaacaatcagttctctggcaggagggtaggggtgccctgatttgtttgccaaatactcccaccatagcccatttcaaactgccattgcaatgtcactaggtacggagttaggaagagatgcacagttgcctctcatgagctgatatgagccagttccacataccactgggtttcaggaaaagttgggaaaacttgcctcattggaacatgggctccaattgctgtggctcccatgggaaactacagtacagcctctcgaacgagtttctccaatgtgctaggscctaccatgagacccaagacagactgtgtcctaactctagtggggtccacagtctactggggaaactggcattaatcaaataattcctctaagtgacacattgagctgaacacttggaaagaagagctgccttacatgcagagcactcccgtgttctttgtttcaaagctgaaacaaaaggtacattgtcgttatctgttctgaatcaagaacatagtgtgtcctctaagtttttcagtacacktttgttcacttcatgatatttaaatcagggttgttgtcattacaaccctttcaagacctagggcttggatttcaagtgccttttcaggtgccagtgaaaaatccatcagtttgcaaccagaaaatcgttcagcggagcttatgtatttatttattagtaacaacagtctggatacttctctgtagttctctccaaatgtcaagcccaggctgggctccatcatgctctgcgcacttctgtttaggaaacgttttcagctggcactgtggctcgtgcctgtaatcccaaaactttgggaggccgaggtgggtggatcacctgaggtcaggagttcgagaccagcctagccaacatggtgaaaccctgtctctactaaaaatacaaaacattagccaggcacctgtaatcccagctacttgggaggctaaggcaggagaatcgcttgaacccaggaggtagaggttgcagtgagccgagattgtgccattgcactccagcctgggtgacagaacaagactctgtctcaaaaaaaaaataaaaaaggaaatgttttcactgttgcgttgcctcctaggtggtcttcgaggccctgcacaatctggagccccgtggctacgtcgtggggtggatcatcgccatcagtttgttggtgggaatcctcatcttcctgctgctggccgtgctgctctggaaggtgagtctggtgattgcaggtccccctggggtccccactcatagatgcccagctctcctgcctttccagggaagamggagtatcctgttagagcttccttcatggcaccggtacagtgaaggacagtgacccttcaggcagggagtggaatcttggctccccttgaggccattcacaactgaggatttggaccacttcagagtgaaggcaaaagtctcagttctctcttctcttaccttcccttagagccctaacataggatggtgagaacctaactccaaaacagaagtctggggagcaactgccagaagggggcgatttcccatttgcttaaaaaagatcagaaggcgaactatagaacaattcttccttcttttcctctaaggaatgtgaggaagatttctgaccagaaaacttgagtaactgagatgggctacagtccagagtagcttcatcataacttctcccaacctcatggtggttcatttggaggtggcccagggtgcagacctgtcctgcctcaagcatcactctctcaaggagaaaggggtgtcctcatccccatgtctaggatgatttgtttgcctcacactctcctttcagagacccggagtccttttccttcagagcctctctattcatcagtaatggtattggaggctttagctgatgaaggtctgtctcttccttgtttccactgtgtccccagctccaaaacagcaccagggaccataactgcaacttcctgacaccaaagtccatacttctctagaattacaaatttcagatgtaggtgaaaacagcctcttagagtattatagatggatattttaaaataagacaactaatttctttgggattacaaaataatatgtatgtattgacctaacataacatatcaattaccaaaaaaagttgtaaaacaccaggagttcacatcccagaaataaccatgatgagcatagtattgcctcattttgacctttttctctgcatatatagatatmgaccaggcattctcataacatcaacttatttttgaatagtgtattagttaaatyttacagtaatatactcagcatattttcaggtgaagtacctctaaatttaaaagcagtgggttcctttttttttttaagtatggggtcttgttctgtcacccaggctggaaggcagtggcacaatcatagctctaactcctgggctcaagctgttttcctgcctcagcctcccaagtagctgggactacaggcatgcacaatgcctggctcatttttttatttttttgtaaacatagggtctcactatgtttctcatactggtcctgaactcctggsctccagctatcctcccacctcagcctcccaaagtgctgggattataggtgtgaaccaacgcacctggcctggatttgatttattaatctgggaaaaacgtatacctatttttccctgaagacagtactgtgaacatctttccatattgttcaaagcacgtttccagcacatcttaaagctgtagagtgtctgcagtctactcatccagtcccctgatactggaatttaggttgcttctgtttcacacttcttttaacagtgccacattaaatatccctggrgccaaatatttgcacaaatctttcattatgtcgttaggttgaaagcctagaaatagaattgccatcaaaaggagtgtatattttaagctttttaaaaattatatttattwttttattttgagatggagttttgctcttgtctcccaggctggagtacagtggagtgayctcagctcactgcaacctccccctcccgggttcaagcaagtctcctgcctcagcctcctgaatagttgggattacaggcgtctgtcaccacaaccagctattttttttttttttttgtatttttagtagagaccaggttttgccatgttggccagggtggtcttgaactcttgacctcaggtgatcctcccgccttagcctcccaaagtgctgggattacaggtgtgagccaccccgcccggcctaagccttttattactattgcagattgccctgtagaaaggtcataccaattcaccctcccacaagcagtgtatcagaaatgtctgtttgccaatagtggatgttaccttttaaaaacaatctgccaatttgttgtttatttaatccacatcgccagatagattcttaattctcctttttctccaactccaactccttcctgctgagacagcctctggtttgtgggtggagaacaaagcctgctcagtgtttggcatctgaaaagacaaggcttcttgctgagttgagggctttggtgcatgagtgtgtgtgggtgtgtgtgtgtgtgcgtgcgcgtgtgtgtgtgtgtatgtgacttccttctgcctttatatgggctcttaaaatgagaggagctgtgtcctttatggctgggtgtgtggaaccagacagggcacagagtggggagtgttgtggccgtgccccacttccccttatagtctgcatgccctccttctggccgccccacctggctctgcctctcaggggtgtcctgtctcctctgcacagcccctgcctcctccagcccaccacctgctttgccttgcttttgctgtgtttgtttaaaaaagcatggttgcaggagatgctgtcatgggtggggagaaccctgaggtcacccagctgtgtgggatccaaagagccaggacctgagaaggcagactctgccctctgccacagactgggagggagagggcagtcacggccgccagggacacaccgtgtgcccagaccagggcttgccgtaactaacgggtggcaggaaagctttgaggaggctgttgaatgaggccacctgggtcacaacagctttgctagtcaacccagagcagtatctcatttcggctcacatttctcgaacgcttactttgccccagtccttgctttgcctggactaggcactgggatgcagcaataactgtgcccttccctgcacttgaccgcstcaccacctagcaatagacctgcaggcataatggagggtggtgagtgctgcgcagtaactgctctggaaactgagaagaaggtgccatgagtccccctcccttgcccccaaggaggasggaggattaaaaggtcacagagaacagygtggtagatgagagcagctttcaggctgacagctgtgggcagcaatsctgactctcacacttgcctgacatgaggccttaagggggctgcttaccttctgtgaccctcastttcttcctctgtaaaaaggagaccatcacctccagtttggtatgtagaggttatgcaaggaaaatgtttagcactgcgcttagcacacagaagccaggggatatttcataaatgaggtgtcattcgagtctgacctttagtgtggtttgagttttccaggcagggaagggtagatgaagattccatccagagggaaggaagaggtgggaaaataagcagggtttgtggagagcagcttgtaaagtttgtcagggcagtcactgacctgcagcaagaccgtctgccacagttgtgaaggccactgctaaccaggacaaagggggagcatgggaggtctgtgagcagagcggtggcatgaccagatctgtgtcgagagagagatctggggctgggtgcagtggctcatgcctgtaatcccagtgctttgggaggccaaggccagaggtttacttgagcctaagaatttgaagttgcagtgagctatgatcataccactgcaccaggtggtagagcaagaccctgtctctaaaaggaaagagagatctagggacagtgtgggggcaagagtagggccattgccatgggtcaaggtaggacaggcagggtttgctgaccagttggacttgagaggtcagggagaaaaaaagaatagctgtctctccttaagataagttcagacaaaggatgggtgcccttaatcagggtggggaaggcaagatgcgaattagtttggcaagaggaggagcttggtgttgggctttctgagtgagtggtgcttagaggaggctaggagacaaggctgggcttgcctcactccctgtcgcccccacccagcagaaggaaggtcaacagaaggaagccccttctctctacttggctacacatccgcatcattctcttcccaccgcagaccagctttctctatgtttccctacacatcgtagggagatagttgcctccagcccctccaaacttgcatctcaaggactactagccacagacgcagaatgatcagccacctctgattcctggtcccacatatctgggagagaggatctgcctggcccagctctagtcaaatgtctactcccatcaactgtggaagggaggaagggagttgggagggagagaatccacctggcccaatgtgggtcatatgtctcccacggaggctagtgggggagaaagatgcaggatggtggtttaggggatactggggaggagactctcagaaaagaaaacaattaggcaggcaccccaaaggagttcgctcytgcaggatttcatcgttgttagtgctgctgctgcctgaattgcaggctgttgtatcataccagctagctatgctgcatacaaactgcccccaaattgartggcttttcacaaccattacatctgacaaatttctgggtcagggayccaggaagggtttggcggggtgattcttccgtcccacatgacattgagtgaggtcacttagtggcatttacctggtggctaagctggtcttcagagttcaagacagcttcattctcatgcctggcaccttggtagggacagctggaaggctggattcagtcaagtccttcttcctctccatgttgactcagggcctctccatgtggttcttccagcagatggtctgactttttatgtggtggcttaggctgaaagagagcgctgccagttgtcttaaatgctagcccacagctggcatagcatcatttattctgttggtaaaagcagtcatatgccagctcaggttcaagagaggggaaatagaccctgcttctcaatgagaggagtggcaaagccttagtggctgtcttttatctgtcacatacatgatgttcgaaatatgggcaaaatcttttctttttttttttttttttgtggcagtcccactctgtcactcaggctggagtgcagtagcatgatcttgactcactgcaacctccacctcttgggttcaagagattctcctacctcagtctcctgagtagctgggattacaggtgcctgccaccaagcctggctaagttttgtattttttgtagagacggggtttcaccatgttggccaggctggtctcgaactccaggcctcaagcgatctgcctgccttggcctcccaaagtgctgggattacaggtgtgagccaccgtgtcttttccctaaaagtcactattacaaacaaaaattcgcctaactagaagttttgttctattttaaagtagatgaaacctcatctctctcccatagtgtcatagataaaatcacagttgaactcctttggggaagaggaggcaaacagaaaatgttggtgcagcatttatgtcagagtgtgcagtctgttgaggcagtgttgtaatgtgataaggggcttggtggaggggatttctttagggaaaaaaatttttttttctcaaaaggctaactatgacttttgagacttataaagtctcaaaagactttataagaggttaaaagggcaattgaaatgtaggattattttaaagacctmcgtatttctagaacttcaactacagacctcttgttaactctgattcccatgtctacaacctaagaatgatacattatgtttagtgaatagtgattcggtatcacactgacagtacggtgcagtaacccaaagacctgttaattgatggtctaaactccagcctcatatttgacttatacgggaggtcttaatgtttccggcttattgccatatyccatatgtaatttcctccattcctttcaaggggaaagccactgagtgttacccagctgccactgctgacyggttgcccacttcactgagggcctttgaagacagcggttggcrgggacagtgttgaagtcctcttccctttacagaaccgtggctcttgaatgtccttctagagtagctcttggcattgctacctatggtcatttgctgctgccttgaggtccggagccaaaagtggttgttcccaaaagtgttgcataaacgtgaatcgtgwcatggtactgaaagctgagcagagcagctggccatgccgccgcattcacagcaccacacaagcctgaaggtctgcatgctttatgcttgcaagatggccagcaccttcactaggcaaagagtagtaggtccctactaggtggcaggccctgggcaaagggacaaagataaataaacaacagccctcacctagtctgtttcttttttttttttgacagagtctcactctgtcacccaggctggagtgcagtggtgcagtcttggctcactgcaacctccgcctcccgggttcaagcaattctcctgcctcagcctcctgtgtagctaggattataggtgtgygccaccatgcctggctaatttttgtatttttagtagagacagggtttcaccatattggccaggctagtcttgagctcctggcctcaagtgatccacccaccttggcctcccaaactactaggattacaggtgtgagccaccatgcctggcctcaacaacagagccctcacctagtcttgaagacctttaggaaaatcagcttcagcaaagccctgaaggtgagcaggacttggcctgtgccaccagcccctggccccacctacgcatgcactgtggtgctactgtttacctaaatcagaaagcccttatcgtgtcagcaagtgtcttttccagagctgagctccaggctccctgctgatgtgctcagccagaccagcccctcatctgcctctgaccctgtgcagctcctggcggccttcaagaaagcccatctgctggcatctcaggcatcttctcatgcttggcggcagcaggccctggctctgacacaaaatccacaatgagggccccaagctaaccagaccgctcttcaaattctgaaatggatcctaatcagctttcccaaagctgagatgttagcagacactgggagccataatttaaactttatgtgcgaggattacagtagccagccaaaccaccatgcaggaagaaaactttgaaatatgaaatgcttttaaaggaagaaaagtccaaatgagtcccctctcctttcctgcagctcctgactgggttggaagatgcctgggcctggcatctcttcaagacaatcataaaggcctgtttaggaggagaaagttaaattgctcagaggtgcaggagggataacaactttgtgtgtgactggcacctttaagaaataccttcagcttatataagccagcctggtttctgtggaaagaatgaagatgatggggtgtttctccttttgaagaaagacaccccccttcccttatttagggctccaagctcttccctccctgtctttctctctgcttccctctcaccctcctcccctccccagctctgtccttgtttgtttgcagtttgccaaaacatacaggccaccactcagtgaaggagagagaccatatcctccctcactgctgtcaaccaaggaccctctctctcccatttgacccttttgcaaaccgagatggtttggagcaaagggaagtgagactgcttggccagccctatggccatgtcttcccaggaggcccaggacctacttgctcaagtggcaaagagacaggctgcagaatgtgtttgccagccctctgaaaagggctgcctcaaaccctctatcagctggggctgttccaagagcctgctgctttaggactggctttgggctcatggtttttatttgagagcattacttctgacctaaggcagaaacacttagaaaacaaatctgtgaaatggctcagagaatgtgtaaggtttggcaacccctccagaggtcactgggttatcaccttcccttcaaactgggctgggagggcatccttgcttctcctccaaagaaaaaaaatgaacagacacatgcccatgtgcttgcacacacacccttcacactgcctcaattagaaccatgtgccaatgacattcagtgggggcttgtttatgcttgggagtaaatattgggctgatgttgcactgtcgacatctcgagacagagacatgctatgtaaatagtcaagtaactgaagagaactataaacatgaagtcttgagttagtccaaaaaaggaatttgtcccaggtcctcagaatcactgtctaggaagcaacccaaaggccgcggagtgggtaggatcccccaagagaccagatgtcatggtgttgtccagctggtccctctcaccctgcagggggctggggaggaagaggctgctgctgcagggtggataccccagaactcagtcaggcctcatgcctcacgcagcacccatctaagtaaggctgtttggggcaatctgttgtttccctaggagttttctggttgcttttggatacatggttatatgagaaaattgtgtatgtctgttacgagggttcagggagctgctctttggagctgcaggaccagcagacacaaaaaccagaaagcacactgttccttcggcttccagccaagcaaagcttggcttgagtcacctcctctagggtttctatgtttcttctgctacagatagaacagttaacagagccgcttgcccctcaaatggtgaagcaagcactggaaggttccagaaaaaatgcagaaaaacattgactccattggcttggaagtgagtgtggggctgctgggcatccagcttagcccatcattaatcatttcccagcaccttcagggtgggctcagctggcaacaaaaacagagatttgcccagtgtttctcaaagctctccccaaggcacccatgcgtgctcacatgagcgggtgtgtatgtctgaaggaggcctacttaaccttgggatgtgctaatttcccaagtgtagggggactttgggtcctggcagtaatggaataggtaggactggctatgaagtactatagcaggctgaaggggctcgtgggtttcctggcatgtgtatgaagagttacagatttagaccatgtatctcttaagcaaaggaactacaggtgctccttgacttatcatattttaagtcagaaatgcatttaataccccaataaacccatcataaagtcaaaaaactgttaagtcgaggtatggtaacttggggattatttgtacttgttagatcatcaaattcagagtcactatctttagtttagtgwwtatctttagtctttagtttttatattttatctttagccattatctttagttgaagtcattatctttacttaaggggatgacaaaaaccttgctaaatttagtttttcacttcctcattcctgattgacattctattagaaaatgttagctaggaagacctgttctttatttattgacttgcatttattgagaactgttgggaataatattgtgcctctagggcatttagaagataacatgcttttttytggttcttgcaaattactttcggtgacttgttctcatgggttgcttattttgagtttttatttttagagaactgatattttttctgttcttgatgaggtaatcaggcagtctctatgttacatgagttaagagtcctagacttacttagcyagtcctcaattctgacacttattataagacatctgatccagagctgcatgttcaactccatcaagccttgcctactttcctcatcggtaaaattgaccttaaaatcccacagttcaaaagactataaaagttaaataagtgaacataactgcatgtgttttgtgaattcaaagacctcataatcttttaaaatattattaaattctgttttatttgtttctttcaaaaattaacagatttttaaaaattgaaaattgaatttycaaaaaatytctcaaaaatctttgagaaaaattgagatgggacaaagactctgtgccttgttcccccttagtgtgagtcctgagtacccagctgtgtggcccacagtctagagccttgaattcactttggggaaaacagaaaaagctgtcatgatgtttcagggctggaagaggtctgagaatcccattgatctcttaggcagagacgaagacactatggctcgaagccagaaaataaccttcccaggctgggcgcggtggctcacacctgtaatcccagcactttgggaggccaaggcaggcggatcatctgaggtcaggagttcaagatcagcctggccaacatggtgaaaccccatctctaccaaaatataaaaattagccaggcctggtggtgcagacctgtaattccagctacttgggaggctgaggcaggagaatcgcttgaacccgagaggtggaggttgcagtgagccaagatcgtgccactgcactccagcctggcaacagagcgagactccatcccccacccccccaaaaaagaaacaatattagtttgacagagccaccactagactatagggtacctttgtgcaaactataatagtaaatagcaccgcttcctaaagactctttacttccatctgtcagaaaaaattcagaaaactctgattttatgagaacaagacactctactgccatctgttggaaaacagttataataaacttatacacatacatgatatctgtgatgtgagtggtatcccccagccccttaaatrcagtgtagcacctgcactactgtacctacaactccctagccatgagagtgcattatgttttaagaaatggtcttcagactctaaaaaaaggaagacatacatcagtggtagctctgatctcccatccaagagattacgcataggctgtgttaggaacaggactggagaccctgcagtgttagagtggggcatagagcttgcaaggctgtttcagccaggggtgggtgggggtgattttcaggcctaatgctgacaccactccactgagagaaagragcttgcttccgggtgcctgcaagagatgacagtgccttcaccttgttgttagcaagaattgcatacataaaaacttgagcacatgaaagccacatgtaagagtgagttcaggtgctctaaatcctttccagattgttaacacactgtctatgtcaaatccttacactagcatagtgatgagaaagtgagccagcttttgctcttagagatgaacaagagaagtctggttcaggccgggcgcggtggctcacgcctgtaatcccagcgctttgggaagccaaggcaggcggatcacttgatgtcaggagtttgagaccagcctggccaacaagatgaaaccccgtctctactaaaaatatgaaaattagctgggcagggtggtacacgcctgcagtcccagctactcgagaggctgaggcaggagaatcacttgaacctgggaggcagaggttgcagtgagccgagatggcgccattgcactccagcctgggtgacagagtgagactctgtctcaaaaaaaaaaaaaaaagtgaaaagtccagttcagcaaggcacactaactgatgctgtttaaatctagagccctatcagctgtctgtctgattcattaagtcagcaaaaaaaatattgagtctgtaccagttaacttatgctacttgacaaaccaccccagtattcagcggcttaaaagcaatatccatctatgcaggtcacagttctgtgggttggctatttggactgagctcagtggggcagtttgagctcagcgagacttacatgtgcctctgcgggcagctgggagttggctagtctgggagggcttcaaaaaaaactggtctcttagcaggttagacataggcatttgtgtggaagcagggcagggttctgagaaagtaattggaagtgtgcacagccccttggggactgtgtaacagacacaacatctcctccctctcatccaattgtcaaagctagtctcagtggagaatcaaggctgggaaaatagactccacctcacgatgggaagagctggagagtcacatggtaaagggtgtggagggtatgtgggcatctttgcaatttatcgctggtaccaaggacaggtgagatgctgagtactggggattgaaagcacaaagcctgccttcaaagagtcctaagacaaatgcaggagataataagggggcagactgttaagtttctgcttgatagtgccatggtagggaaatgtgacttctctggaattacaactgagtgacctgggattattgacacattacaacatcagcagccaaaggtatgtgctagagaatcctatttccctgttacatccttccacagtttcatgattacattctccttcatggcatgtgaccagccacatctggccatgttttcttagccaaccacatctttatcgcaaaagaatgacatttcaagcagtagcttcttagatttccattcagtcttggtccgtttttctggccttctgtgggtgtgctgtggggatgatgtctatgactttttcttaattatccagaaaattctggccaagcaccttttcttgcagaggggagaaggtgaagaggtttcaggagagaaaagtatatgtgtgggggcgtcagaacatggcattctgatgaatgtggtcttatgctgggaagaaacctccagggctgaaatcaccaggaactcaatatctgtttacaaaactggccttgaggattgaagctcagaacacaagactcttgccagttgttctaagaaagcttctgctctttcccagtcattcaaactgcaccaccttatcgacttcccctcacrgtgaatgctcaggatctccttggcaacgtgggtgaagatacctgctggctctcttgacagttctcgtctttggcttggccaataawccccctttakggaagtagaaagatggtggcaacagacagctcctcagctccacctgccttcccttcttcaggggagcttatgaccatcagggtggctgtgatgcttccctggatgtttggctcacagtgaagaagcatgaggacaaatacacagacaayaaaaacatttgatgtgcccatgacagctgggtttgcttcacgatttgtgtaggacacgtcttatatgtgcatgcactgttggcagcagactgcagagagtcttaagggttttccartatgacttgggaattgcaagctgatgataccatggtaccacaacctgcagtgtggcaagcctaccagcaccaggtcaagtgtgtgtctctgtttgatttcctctattcaaggggattgaaacaatgatttgagggcaagtcatttatttggaaggtgatctcaggaaaaactgttggagagcagggaaggaagccaataaaagatttgtcatcaagctggttacctctgcaggcaagctccatggggaaactggtagaacgtacacctcagggttatcccacccaaggagagagggagctggggtatttgtacacccgatacagtcagccttgtttaaaggaagatgcagagaggaatgtctgacctcataaacagagcccaccaatgttagtgagccaaggacgagagatgccgagtctctcagagcatgggaggaaaggtaagctttgggctacaaacgttgcttcactgtttggtggtgatgactatgtgagaaaaactagacacttgtcttaccatatgtgaaaagttgtaagaccaaatgtaacatcaaagggcagggtyttttcagaaytaagctagaggaaattgccatcctgggtcaggatgaaacgcccgttytaagtgagaatgtgctgctgactgtggtgcacagacagcacaaattccatgggtttgagagaaagatgtaaatgacagcaaggtagaatgcagacctgcagacgctttaaacagcctctcacgtgagagcagtatttattaaattattccacagatggctaagatctctcaagatactaggtttatcaaaagccaaataagcttggggaatgtcaggtccctggtttttttccccaccggaattaatggtaatggatcctttactttccactgtacattaagactctctaaaaaaaaaaaaaaaaaaaaaaaaaagccacacttcccaaacttatttgaccatgaaaccttttttttttttttttttttttttttgagatggagtctcactctgtcgcccaggctggagtgcagtggtggcacgatctcggctcactgcaacctccgcctcccaggttcaagcgattctcgtgccccagcctcccaagtagctgggattacaggcacacaccaccatgcccagctaatttttgtatttttagtagagacagggtttcaccatgttggccaggctgctctcaaactcctgacctcaagtgatctgcctgtctcagcctcccaaagtgctgggattacaggcgtgagccactgcgcccagccatgaaacctttttttactcccaaacacctttgaacagctctcagtaactggtattccccagcacacagtctggaaaacactacaccagatgcattttagaaggaacaaacagcttacgtaatatcacccgcaggaagtccatgcattttgaaaaatgtctccacaggatgtttttcttgccagtgttttctctaatccgaggggtcctccaagcctccccagccctgtgagtgcaggtcacacctacccagggacagactgccttggggtcacaatggctgattcttcagcacttctaactcagcttctctttctttctgcctttcagatgggcttctttcgccgaaggtacaaagaaattatcgaagctgagaagaaccggaaagagaatgaagacagttgggactgggtccagaaaaaccagtgagctgccacaccagtcacatgacctgatcactagcctgtcatccttggtctttgtatcttccatatttggaagaaaaaaatcttctccagatttttcggaggccccactgatgctgttctcttcttcattctatcaagcccaggtgccagyctgaggcagccacttcggccaggtcacacgaccggggccagcaccacttcctttaaaratgaactctgaactttggagagtgagctacagagccgagcaatatttatggatgcaacacgcatggtcaaccctcaggggaaaactgttacctaaagtatttttataaatataagccttttatactgattatgtcttttatatttgtatcgatgttttattatttctattaaatagttatataattcactcaagcactgatatctggcctaaaatcttggaagtacatgtccatgaatacaaattttaaaggatgaaaatcttaccgtactttggaacttgctgtttaaaaagacagatgaaataagttgaagaaacctcatgtaatgaatccaccaggctggcagtggtgcatataaactgtgggtgtggcaagaccccgaagacatttcacatctttatcgcctcgatcaagtgtggagtcacatgctaatgtgtgctaaagaactgtaagtgttttttcatatgtacttttcattggaagattcccaacaagaatttggatggaaaacctgatccctagcaagaagtctgctctgtatcacctttatatagcagacatgtcaccctgcttctacacagatgatggatgaaagcttggagcaatgccatgtggtcatctggtaaacctcagaatggcgtctcatcctggacatcctgcatcagagttcacacaccacaaggactaaatccttgtcccctaagcaaagaattgggtctgaatgctgtgagggattgcctttttgtggtaattttcattgagagatcttcatttcccctaccaccctggctgtcccagctagtggtgattgcagattccttcccagagaggacatttaaccgttttaaaaaaaatgtcttagattgggttcccaagaagcagtccctgaaacaaggatttgtgtgcaagtaacttattaaggaagtattcccaggggataccagtaagagagtgggggaagcaggacaaggaaggagacaaagccaggcaaatgtttgtcatttcagggagagctccatgaagtttagcctcagcctgatcaggggaactccggaggaaaagttaggcctcagaggtgtcccaacctgaatcaaggggctggctgcacccagaggagatgtaaacgttttattctcaattcctgctggcgtaatggctccagtagctcaggacagtcctctaaaggacaaccacagatgcatcctcagccaggggagacacagggaaatgatgcaaaagaaatgatgcaaaggatctgagcagaacactgcccctccccaccccctgaatgtgtgagtgctgagttayggccttcagtatccaagctctctgtttgacagtagatatattgtcagatgcactgtgctgcttagttttgagtgcagtgtgattttctgaaagggcaatgagatgatggatgtagcatgctcagcrctgacctggcccatagtgatcactcaataactgttaacagctatggctgctattcctactgatggataaccatctaataagacagaaaacatggggctaagagcagggtctaacggagtcttaatggcttattacagcctgccaaagtgccagctacatacacatggcatccagtgcggatgaaacaatctataaaaccaagggtctttcttatagcaccttttttactggaagctaacacgttgggagtccgtgaacattgtcaaaaagacatcaaactcaacttctgggaagacagatttttaatacacatacttggctaatactcacaaacatatctaaagttttggcaaaattatgagggtgatgggtgggtactaacctggcatggagcaggtgtgtcttttggtttcttatgcagttgactctgctgcagggagattacagatgtaacctcatgcttctcttcctggtgaacatgggaatagaccaaaaaaatcaagggtcaatggcatgaactaagctgatcctggaaatcagggatgttgcatctaactgtgggatggaggcacagaggtagctacagggagcaggatgaggcaaagaaagcagctgtcactcagagttcgcttatgagttttatcaaaagcagcaagaaaagcagtcttgggtgggttttatcacttattaacagccatttatgaggcccctgctgtgtgtcaggcactgtgcaaggtgctggaggttccccagagaacacttcagggacattttgcctcagggtggcaaaatgcagtggcatgtggactttttgaatgggatgccatttgcagctttcctttgatggactcttgttcataatgccatgttttctttaatgaatcatttaggattcttaggtgatatttctggaacagcaccatcaacagctttggccacatgcacttagagcaactaacttgcctcctgccggggtgtaggtgcgttggtgacagtgtagaagggtgattcgcaggcccatgttctgcccaccagcaaagccccactggagaagggtagactcctgtgggcagtctcagagctgggacctatttgcttctgcttgattctgcgtgggtggacccacatgagcagctgtatacccaggaggtcactaagactttataaaggcaggttttaagaaaaccagccttggcatcaccaccagcagatactgaaagcctccccaggaacctgtctggggaaggatgatgcctctgctggtctgatcgtgctgagtagcaggtgggctacggggactggggagttaagcattttgtgcagtgatagagaagtcaagcatatcgttagcgctctctcaacttgggcagttcacaagctccttcccagctcagaagccctctctatgctctcaggggaagcagatggggtggatcagtacatctgtgttacccttccagaatattatttgaaaattctacagtatgttctactttctccccttcctgcttccatggtttcactgtggaatcctataagatattctcctgagcagtattatttcagtttccttcagcttttagttgaatcttcaatgtggttttaaccaactgttcagagaactgaaatggtttttaaatatgaaaaaggacctttgtaaaaatggagtaaaacagtgccccttttttaaaaaaagttttgcttatgcttaatttacataggactcaggagagtttggaacatcctccaagtgggccatagagctgtcacaaagaagaggccatgatgtttagaaacaaggggacactagcaggaggggcagggtccactggcttagtggcaactgacaggcatccattccgaataactcagcactgaggtttcctcaggcagttctttaggaaaactgtcagcatcatgggtactcagaggtatggtagaccttgtagaagatccactaggaagtcctccttcaccaaatcatgtagctactgcccttgagccaaaggcaatgaggtttaaaacaaaaacccaacagcactcctgggaacatcctgttttccatgcggaagcatagcagatccccagacgatccgtgtgctgtatgctacctgttgaaccctagcatggtggctttttaaaaggttatttatgacttttatttttgggtaaggcattatggccaggtgcatgcagttatgtctgggttacgtgtgaaacgtacatctggtgaactgtatacttggctcaaacttctcaaaatttagaggtgctggaaaggattgtcacttggagcctttagtagacaaaaggcagaaagtgagcatcatttcagaaatgctttagtatgcacacttttagctgatattttgatatatagaataataatatacacagtggagaatattcaaagagtggctgaagggagaatacagagccagtagggccaaaatgaaacttctaggatgtcttctgaattttcagcacatggggggaataagtgaacaaatttcccaacatcgtgcaatgctttatagcacaatgatctagatttcagactgtgttaaggttttttctttgttgatgttgttgttttaattctaatgtgcacggtgtgactggcagagtgagtttaaaagctttacgagtgattaattgcttggcaggcacccacgctatctgcatttccagaactttactgatgcatccatgtacatttccactgaggaattttggtgggtggggggaggttgtgctgcctcacaatgtcacgtgtattaaagtctaagcagtcacttytgattcacttgcmctgtttgggaaatgtcaggtttacaaaaacatacatgtttggaataaaaaatggctgcaaacaattcagaagttcaatctgtaatttacttgctaataagaactttttaaagtgttgaagctagggtttcaatgtaatacaacatgagcattaaagagaacatcaaggtccatctaattcacatgaacaacccacctgatgtggctgaactgtctgcagtccttggcctccacacaagaggtaccacctcctctctgcatcaccctgactcccctggcccagggctacacctaggttcttgatcttgagataaatgtgcccaaattaaatggtatggattccttattatcagtagacttctttcacatgtgcctgccagttactaagcatttttccagaagcattttgataacattcttacacatttacaaatattgtattctcttaggttttcactctccttcatctgtctattaatagttatgttcttgttcatattccacatgctgttcatttatgtgtttttttttccctagacaagactgttaccagataggggttccaatccagacaccaagagcaagttcttggatcttgggctatcaagaattcgaggctagtccctaaactgaaagcaagtttattaagaaagtaaaggaataaaagaatggctattccatagacagaacaggaccagggctgctggttgcccatttttattgttacttcttgattatatgctaaacgaggggtggattatgcatgagttttcagggaaaggagtggacaattcccggaactgagggttcctcccctttctagaccatatacggtaacttcctgacgttgccatggcatctgcaaactgtcaagacaccggtgggagtgtcttttaacatgataatgcattataattagcacataatgagcagtgaggggaaccagaagttactcttgtagccatgttggttttggtgggttttggctggcttctttataacagcctgttttaacaaggtttttatgacctgtatcttgtgccaaccccctgtctcatcctgtgacaggatgcctaacctcctgggaatgcagcgcagtagctctcagccttattttacccagcccctattcaagatggagttgctctggttcaaacgcctctgacaagaccaataaagatctatgtattttcttggtgtttttcaagagtaagcctttggctgtaccaatcaagtctactgggttttgctttctatttcgttactgcttttagatttattaaaatttcttctattgcctgatggttaaaattcatacacatagacaccacacagtataaaagagttatgaaaaaatatacaccaatgggttaagaatgattgtctttaggtaagtgagattgtcaggcttttgctttgttttattttgtttttatttgaatattcgttttctacagtgagcatgtattttgtaacaatgaaacatatgcagattacttgtaaataaaattatatctgggagactataaattgctaagccaaaagagatgccacattgtaggtctggaaagagatttgttgcagcaaagagcattgatgagcctgacacttatgacaatggtccagtgagtaatttcaagcattttaattccagtgcttcctggcttaacaaacctgccaccattactaatgctaattaaataggtttctctgaggttgcccaamctgttttcctaagccaggaaatggactcgacaaactcaaaagaatcaaaagatacaaatttaagaggaagaaaaatcactaattagtgaagtctgcttcctattcaatcaggagttttacagctcaccagattacctctcatccttaaagtctgtctggtcctcaggttactgtttagtaacagaattgatgtaagaattacttagagctcaggctgcactatcagaccgactggcagctatccatcagcaaagccacctgtccctaagatcatgtccgttcactctatgtatacatgcaactaaagtgtgtataatgagatattgccatccctgagctgaaatctaaggctgcctgctgccaaatctctgctttgcttcaaagtccaaattattttatattttattttaaatcagttttttaatcctaaaaattaaacctcaataaagggataactactatcctttgaagacaaccaattggtattttaaaaagttggcatttaaaaaagaatctccaggaaatgtttcttctagaagatgactgattaggaaaaaatgaaattatctccaattccacatctactctgaacccaccttatcaggagaatatttggctccatataatagaaaactccgaattaataaggccttaaacatgataaaagtgtgttcctctctcccaaaaaaagaagcagaagctctggtacagcagctccatgggcatcaggaatccagctcctgtctttctcagcaccctcaaggttgcctcatggtctgagatgactaccagggaactagctatcatgtccacattccaagccaaaaatagaagaggacaaartgacatatgccccctcccttttaactattcttcctagaagttccatataacgctggccagaaattaattatgtatgtagatatacccacccactaaggaggctggggaatgcattattaaggaataagaggagggtaagtgttaagagacaactaccagttgccacaccctccactgagaaaatattcagactatagctgccttgagctctaaacttgtacgcttcaaatcctt

SEQ ID NO: 8702 - DNA, 31427 bp, Homo sapiens
  misc_feature (1)...(31427): n = A,T,C or G, or insertion/deletion polymorphism (see Tables 1-2)
aacaagagcgaaactccgtctaaaaaaaaaaaaaaaaaaaattagctgggcatggtggtgggcgcctgcaatcccagctacttgggcggccaaggtaggagaattgcttgaagccgggaggcagaggttccagtgggctgagatcgtgccactgcactccagtctgggcaacagagactgcttctcaaaaaaaaaaaaaaaaggccgggtgcggtggctcatacctgtaattccagcactttgggaggccgaggcgggcggatcacaaggtcaggagatcgagaccatcctgaaggaatgaggagccccaggaggtcttggtaagagataaaaaaacaggagggggccctctctggctctatggtagaaacggtgaaactgtgtctctactaaaaatacaaaaaattagccaggcgtagtggcaggtgcctgtagtcccagctactcgggagactgaggcaggagaatggcgtgaacccaggaggcagagcttgcagtgagccgagatcgcgccactgcactccagcctgggcgacagagcaagactccgtctcaaaaaaaaaaagaggcctggtgcggtggctcccacctgtaatcccagcactttaggaggccgaggccagcggatcacgaggtcaggagttcaagaccagccttaccaacatggtgaaaccctgtctctactaaaaatatacaaaaattagctaggcatggtgtcacgcgcctgtaatcccagctactcaggaggctgaggcaggagaattgcttgaactcgggaggcggagattgcagtgagccaagattgtgccattgcactccagcccgggtgacagagcaagagattctatctcaaaaaaaaaaaaaaaggaagaaacccacttggcctgcttttccttcagagctggtaggggggtacactgggggaaccagagtaagggatattagaccaggggctgatagaacaccagtcaccctgctgcaatgcagagctgtgggagtatcatggccacagtaacttctgcccttccttgacagcccagggcctgggatgggcagtgtttctcatcttgggtggagctgggactcgaaacctacccacttctctgggatgggttcctttatatggcactggggaagggggctggtagctccctatacagacctgctttaaggatattgggtaggcagagacctggggcagaaacagacagctggggtgagtggtctgagtgtaggagcagggtctggagatgaaggcctttgggaggtctgggttacttctactccctgtacaggacctgaggcctcacagcaaaggcctcttgtctacaaagggcttcaagatctggggagggtctgtgtaagcacataaacacctggaagaagaagaaagggatagcttgttctaggctgttaggggcaccctcccaaccccaagaatagaaaaggcactcactggccagtcgaagtggttcatatctgtaatcccagcactttgggaggcaggaggatggcttgagcccagaagttggagaacagcctgagcaacatattgagacctcatctctaccaaaaacaacaaaaacaacaaaaaaaacccctaaaaaacacaaaaaacaaaaacccaaaaattagccaggcatgatggtgtgtgcctataatccaggcaactcgggaggctgaggtggaatcacttgagcctgcagtgagctgagattgtgtcactgcattacagcctgggcaacagagggagaccctctcaaaaaaataaaaggcacgcacgcccccaaacctgaaatgatagacactaacctctcagggcctttatattctctgtgcaacacaacccccaccagacccttgcacctctgagctcactcccagttttgcctatgaggtgggtaagactctgttctgagcagcagggtctaggtgaggtcatgccattggtgaggacaaggactatttggcgtaactgccaagaaccattgttcgcagaaggtcatggtgaaggggtgggtagaagtccatccttgcagaacatgaggaatcctagaagcgatgcctgcttcttcctatcttctctgattcctcccatccaagaaagtagccaagacacatgacaggagttgaagtttattcttggaaaaaacaaagtcccatcctccccccattgtctaagaaggttcttctaggaggccccgcccctccaaatggtcatttctcttttctgaccccagcttccaccaatgccgttaagatgccgccacttgggtgaggggctcctccaggtactgcaccaaagcctgggcctgcagagggagaacagagatcagtcccgcacacagcctggcattagggaccccaaatccaggtctgctcccagtgccataggaagcaaccagcccccaacccccacctgctcttgggagctggcccacaccagaaatggactgagtagacatgagaactctagaaacagggtcctggtgggagtgaacacagtgtagaagcacgaaggctgggcccagggctatggagggatgggcacatacacaccttggccttgagcattccaaagcccacggtctccttggcatacatacacagcagaaggttggccactcgggtgatggctacacggccctcctggtgggggtgatatgatgggatgtgatgttctgcttggcacccttagcaccctccttccccaaaggcttctctggccccagagagactatatcttcctcccatgccctgggcacagcaggaagttcagcggaaaagcttttggccacagccctgaacatggggttctgagcccaggttccagcctcagcacagccacctactaaccatgttactctrggaaacttagtctctcagaaattcagtttttctttctgtaatccctacctcatcccagttggtgagggtgctaataccatgaaatttcatatctgccaacagttgtccaaatgagtgatgttattactgtgagctcaccccacagacactgagaggggcatgggagtggtaacccaactggtatttctcctcttttcccatggtaatgtttttcaaattgcagatttgaccccacagttaggagataaattaagaaggttgatcagcattaaaaaccaaaaaagaaaaaatgaagtatattacatgtagtaggaaaagtattgtttcatgacttttgttttagtgggtctatgtgtgtgttgagctctgacttaaaatgtctttcttaaaaaattttttcctatttatttatttattaaaattttttttgtagagatggggtcttattaggtcaccaaggctggtcttgaactcctggcctcagataatcctccagcctcagcctcccaaagtgttgggattacaggagtgaggcactgtgctcagccttaaaatgtatttctttttttttttttttttttgagatggagtcttgctctgttgcccaggctggagtgcagtggcgtgatctcggctcactgcaaccactgcctcctgggttcaagtgattctcctgcctcagcctcctgagtggctgggattacaggcacgcaccaccatgcccagctaatttttgtatttttagtagagatggggtttcaccatgttggccaggctggtcttgaacacctgactttgtgatccgcccgcctcggcctcccaaagtgctgggattacaggcatgagccaccatgcccagccccttaaaatgtatttcttatggctgggttgtggtcaaaacgtttgaaagctattgccctatagcaccagctctaggcatccagtaggagtcatatgttgaactaaaaatggcattggttgtgcagggggtaggggagagtaggcagttgagttacaatgaagatccttcctggagagttcaccttctggccaatttgaaaaaaacaaaagtaagttcagcaaacttttactaggtatttattgtatgccaggaaccaagcactgcactccctgcctctctgacctcatctcctactaccctcctccatctcacgtaactccagccataccaaccaaccctgttgatccttgagcaggcataattctgcctcagggccttggtacttgctgttctgtccaaaatattcttccctcagataaccacatggcttgtcccccacctttcttcagatcattgatcaaatgtcaccttttcagtgagactgtccctgacacatacacccaacaaactcatactctttcacttccctgctttctctccattgcattttcaatacctaatatatactatatattttacttattttaaaaaatgtggccaggcacagtgactcacgcctgtaatcccagcactttgggaggccaacgtgggtagatcgcttgagccaggagtttgagaccagcctgggcaacatggcaaaacccagtctctggaaaaatgcaaaaattagcgaggtgtggtggtgcatgtctgtagtcccggctactcaggaggctggggcaggaggatcacctgagcccagggaggtcgaggctgcagtgagccgtgattgtatcactgtgtaagatttattagggctgggggttttgtctttctgtttgctattttttccctagtcctgagaatactgcaaggacctaaatacttgtcgaccgaacagatactaagaagttcacaatctaatggtgacttcccctttctggacttcattttcctttctttgaaagcttaaggggttggactagggtctggagactgccatggttctgtgagtcggtgaaactgggatgacaacactttgtgtttgcacgtcattctactgtttatacccattatttcatctgaccttcacaacaacccatgaggggagcggggagagggaaattattgtcttctccttaaacatgaggtaaggaagctgagagaggttaagcgacttacccaaggttccacaactgataagtggatggctgagaccagaacccaagtcagacctctcaggtccagggatccttcctcaccaccacttgatgaatagggtcctgcctattacaaatgctgctgcagaccaactcttagtaatcttccggagatcctgtccctgcccctccaaccatccaggatggggtccaggtcgcccccttgggatcccctttgggggacaggggaagtctggctcccctctccataccatgcagtccatgaggatgaatttgagattgtcttcattaaacgcttggttcccgttccggtcgtaggcggcccagatgttactggctatggcagcggtgacccgggcgtcagtgtccccrtaaccagagtaggccagcagtgatccctcgttattcagcagcctggtgaggggcggggagggatagcgatgtgctcagagcggggagtaaaacgtctgggtttccatcccaagtcccaccaagggcacatccagcaaggctctggcctgagcgtgtcccggaacatgccctaagcacccagcacaccggcttcccttttcgacaggggacctcccggccggtatccccagccgctgccccctctgccgcttcctcccttcctggtgatccttccccacccctccctcagggagccgcgcgccgccccactgcagcgctcgccgctcgggtccgtggtctgcactcacagggtgctctggacgcctccagtgttggcttggcttagcacctgggtcaaagccttggggcgcagcatgcctacggttcctaaccctgggcttttgcacccagatctccgaggtgcctcccgcgggccgctgcccgctgcttcccgtagtcccgttggcctgctccgggacgccctgggagttgtagtttcttcgcctggctattgtggttccgactcaaccccgccccaccgcgggggkctctgggaatcgtagttctttgtggcctcgcgaggcaccctgggaattatagttcgcctttccaagccgaccacgcggttgttggggggcggaaaagaacgggagtgaaaggacagcagcagcgctggaaggacayttaaccccttcggggagaaaggaatcaacgtgtccgcttggcagtccacgattcaataattatactacatcctcatatttgtcaggcacgcctttggttactttcaaaacagttttctccgttatgcacaattctgtgcgatgaggcgagaggtactattattattatcttgaggaaaccaaggctctgaaaggccacgcagccaaaacccagctccctggaaccgttcttaatagaccattcaggccgcgaccctcggggctatagggtcagtcccagagctgagaacctaggtggacgtgcttggtgggaaaacccaacctccaagtcgggaaagtcccctggcctggaagggacttgggcttccaagaaagaccaagttatcacagggaacggagataaagcggcgacacagaaagtcctttgtcccggagccgagttagccgcggagggggcggggaggctttgggctggaggggaccgcggcacggctcgggcgggcagcgttgggtcgcggtctcccggggcagtccgccctcgcccccgcaatgaagggcacgccccttccccctcccagaggccccccaggggcccccgcctggcgagaccctggccgggctccggacctggggcttggccctgggcggaccccgctgcagtggcccccccggtccgcccggggcgctgtggctgcggctggtccggagggggcggtgaagcctcggggagggaaggggaggagagaggaggggannnnnnnnnnnnnnnnnnnnnnnnnnnnnnnnnnnnnnnnnnnnnnnnnnnnnnnnnnnnnnnnnnnnnnnnnnnnnnnnnnnnnnnnnnnnnnnnnnnnnnnnnnnnnnnnnnnnnnnnnnnnnnnnnnnnnnnnnnnnnnnnnnnnnnnnnnnnnnnnnnnnnnnnnnnnnnnnnnnnnnnnnnnnncgggtcgggctggcgggcggcgcgggtggcggcggcggcatggcggagccgcggggccgagacgaggccccccattcgggtcaccgtcaagacccccaaggacaaggaggaaattgtgatctgcgatcgagcctcggtcaaggaggtagtacagcaggcggggggcggggggagcgcggaggaggggtctgcgaagagatggggggcctctctgacggtccggcgtcccggagggccccggagaggagggcgggggccggctgggactccgaggagctgaaggcaaggagaggcgggtagggggcgccctgcgaggggagatctgggggagcgtggcgcgtgttgaggggcgggttttgccttgtggcctgggggcgtggtggagagtgaggaggggacaccttgcaccgggaagggggaaggaccctgggtttgaggggagtgtgccggagtgggggcccgggctaggtgctaactgagagaacgggccgggggcaggcggagagcgccggcgcctactctgtgcctcagagaacgcccagtgttctctgagcgacggggctgtcgggggaggatttccctgtgcccagatccttcccactctttcaaatcgacgtggttacatttggttctcagctcttctgagatttacamggtgtgcagtaggtgcwyaataaaatcttgttgaatgacggactgttgcctgtgttcgccaccccctgtggccrctccataatttcacataggcggggcttaagataggccatctggttggaagagagggatctggaagcagcctctgcttaacaagtgcactgtttttacttaaagtgtgtgttgtgttttgttttgtgttgtgttttggaggggctggtagaatttgggaagtctaactccatccttgctccctccctaaccacatagaattactaaatttcagaatttaaatactgtatgttccctacaaagctgaatttgaaaacggctctcattgagaggcagtgtgtttagttaagagcctggactttggtgtcaagacctgagttctggtctgcctggggcaagttaccttacctcgctgatcctcagttttctcatctttaaaatggagatacggctgggcgtggtggctcacacctgtaatcccagcactttgggagtctgagtctggtggatcacctgaggtcacgagttcaagaccagcctggccaacatggtgaaaccccgtctctactaaaaatacaattagccaggcatggtggtgtgtgcctgtagtcccagacactcgggaggctgaagcaggagaatcacttgaacccggaagatggaggttacagtgagccaagatcgcacctctgcactccagcctgggctacagagcgagactccatctcaagataaaaataataataaaatgaaaataacaatatactatatctttaactggtgaataggtagtgctcaataactggcatctatttgttgtagttgttaagagaatactgggaatagagaggagagaaaattgggtctcagaaggctgaaggtccaaagctgttgaaggagttgggatgggaggctgctctgccttacagagaactaggtggagggactgaagctgggaggcagatagcagcaagggctttctagggtgggagactctgggatggagctgagagaagagcctctcactggttcatctcctttgttaagaaaggagatgcttattgcagctggaggaatggcgtcgagactacagaaaggacttcccatgactagagatgagagcaagagagtgcagaaggtgttgaaaaagagtcagggtccctggtagggggagtccaggcagcctccacagtgacctctgcctcttgatcacagttcaaagaggaaatctcccggaggtttaaggctcagcaggatcagctggtcctgatcttcgcaggcaagatcctcaaggatggggacacactgaaccagcacggaatcaaggacgggctcactgtccatctggtcatcaagacccctcagaagtaagttcaggagcagagcagatccagcttctgattgggcctccccatctgatactttctcactcattgcttaactgtacccagagggcctaagctgaggcccaggcaggtagctcctggatgaatatgatctcatctctaggggaagggaacctgatttaccattcccagaatgccctgaagacagataatactagctcctttctccctctgctggtttactgactgccctcccgccatcaccccactccagcctcaggactgctcaggaggggtcttgggttaaaatagttgtcccatagcaagcacagagattgtcacggtaccttccctcttctagtgctcactccaacaggattctcctttctctgtcctcagggctcaagatccagctgctgccactgcttcttccccctccacacctgaccctgcctcagcaccctccaccacgcctgcttcacccgccacccctgcccagccctccacctctggcagtgcctcttcagatgctggcagtggaagccggaggagcagtggtggggggccctctccgggggctggggagggatcccccagtgctactgcgtccatactctgtaagccctcagagaggagagcacaatcttgtttggggttggggagttggggaaagccaagaggagggaraaacaggagttcctgctcctggtctgatggggataggggaccccatgacagagttccagacattgatacttgagtcaagctggggaagaaactagtctgaggagttctcagaggtggggaccatggctaagggttaggagtgaggggagaaatggggttggggatgtggggaaccctaggtaaagggaatggaagaccctgtgagtctggggaaaagttggatccagcagtagccacatgggccactcattcaacagaccattgctggttgccttctctctgctcagttctatgtttggcacagcctcagtctagtaggctcacatttttttgccagcagtggatcagggccgggctgtgggaatgacaggaagagggacatgtgagaagcatttggggcgtgtcctggagatctgaattcagtggctctggctaagtgaggacactgttcttgtggcagactgtgaccctgcccccttcccacagctggctttgggggcatcctggggctgggcagcctaggcctgggctctgccaacttcatggagctgcagcagcagatgcagcggcagctgatgtccaatcctgagatgctgtcacagatcatggagaaccccctggtccaggatatgatgtctaaccctgatctgatgcgtcacatgattatggccaacccccagatgcagcagttgatggagcggaaccctgagatcagccacatgctcaataaccctgaactcatgaggcaggtgagtatgagagggctggagagctggaggacactggtgcccagccgtgccctgcccagcctttcctactttgtcctacattgatttgttcattcgtgtattcagcagttttgaacactggaggtacagggatgaaaagacaggcctagcttttcaggaattccaggtgtcaaagggaagtaggacaagtaaaccggcaattagaatacaatgtggccattgctatcagaaggataatcatgggatcctctaggagcatagagaagagctcctgaccctaccctaaggcttagaggaggccttaagaaatgtcaccgagctgagacccaaaggaggaagacgaaccagggggaaagaaagaagaacattcagggctgagggacagcaaatataaaggcctgggagtgaaagatagtaggttgtttggggagcactgtggctgggcagggcccagttgggaatggagaaccaggggagactgttgtgatgttgctctttgggagttccagctcatggtccgctccaccagaggaccaaggtagatgatcttcccagcagggctgtggacaccagtgctggactcaccagaagataatttatgtaaggtcaaggacttgtgagtgttttgttcactgtctagaacagtgcctggtgcgtggtagtcatgcagtaaatatttattgaatgaatgaattacggaacaagagatcagagttctgggaagctgggcatatcagttataaaggagtcttagaaaaggcaagtgtggagcacatttgggaaggagagggaaggtattccaagttgaatgggaacaagtagttatacttatttttctgtgatgaactcccccggggttgacatagccaccccttattgagattgtgccattggctccatagaagaaagcccccatcttcagtgtttctcaaggttcaggcagagcaaagacttgggggtgggaattacagggtgtcagtagctttattccagcttgaacgctttccttccccaacttgcagtcatttaccaggaatcacagtatggtcttggacagaccaaccaacctggctttgaacactgtcttcaccactcagtgactgtgtgtcccagggcagcaagtcaattaacatctctgagcctatttgctcatctgcaaaatagggacagaaataaacacctgagatggttattgtggagattacatgacttgaattccgtaagctacttggccctgtgcccatatacagtaggttctcagtagatgttaattttctcttctgcctcctcccctttctttctgtgtctcttctgactcagtttccttgtgcaccctgacacttctttggacactctgagcctaagggagggaagctgctgccctcacttcagctgggatcattgtcctccactagaaaaagccaaccaaaatacccacagggaggcgggcttggagccaagattacagtagaggaaggaagtccagtttactctactccctgtcactgtggggcagttcctgggccctggtcctgatcctgatacagaccccccttcctcaaggcccacccttttcctaggttggtgctcccctggttccggggcccattttgtctctctcccttgatcagacaatggagcttgctcggaatccagccatgatgcaagagatgatgcggaaccaggaccgggccctgagcaaccttgagagcatccctggagggtataatgccctccgccgcatgtacacggacatccaggagcccatgttcagtgctgcccgggaacaggtgggatcaagggccagggtagtgggttgggctgtctgggctcgagattccctacccccaccccaggcaaacctgggcctgctcttctttctttccccagtcccctgaggggtgggccttggcttgaaggcagttctcaacagtacatatccggggatggtccattttggcatggacaaatataagcagaggtccttgtggaagtggttgaggcatagcatccaaggaacttgacatcctgacaaacttcttgtaccaggggctcaaaggtcacgtggcaggcctgaggtcagacgccagccctgatacagcatgtctcaagtatggtccatggatcacctgcatcagaatcacctggggaccttgttgataatgagaatcctggtccccacctttgagctacttattgaatccatttctggggttgggccccaggattatacacttttaaaaatgctttatgaatcctattcaagtacacacaaaaaaatagataaaaatgtaacattctttttttttgtttttaatcaatgttgccctaacatgttgccatatataatttcagtgcccttttggttctttctttctttcttttttttttttttttttgagatggagtctcgctctatcgcccaggctggaatgcagtggcgcaatctcggctcactgtaacctccgcctcccgggttcaagcaattctcctgccttctccctggtggctaagactacaggtacatgccaccacgcccggctaactttttatatttttagtagagatggggtttcaccatgttagccaggatgatcttgatctcctgacctcatgatccgcccaccttggcctccaaaagtgctgagattacaggagtgagccaccgcgcctggccatggttctttttaaaaatttaattttacattaaacacattctatgtttgtatgtttgaaaatgcaaaagttggccaggcgcagtggctgacacctgtaatcccagcactttgggaggctgaggtgggcggatcacgaggtcaggagatcgagcccatcctggctaaaatggtgaaaccccatctctactaaaaatacaaaaaattagccgggcatgatggcacatgcctgtagtcccagctatttgggaggctgaggcaggagaatcgcttgaacccgggaggcagaggttgcagtgagccaagatcgtgccactgcactctagcctgggcgacagagtgagactccatctcaaaaaaaaaaaaaaaaaaattcacaagttacacaaagtaaacaaaagggtattccaaaaaagtatggaaaagtatacaggctaaaaaaaggtttacagaagggatccctctgtttccatctcccagccagctcttttctacctcagtggtaactaatgttgttagtatcttgtttattttcctagacatatttaatatttgcaaataagacataggtagagttgtagcctttacaaacccctcccctctcctattctttttctttccagaggtaactagtatgctgaagttgaagttggggtttatcattctgattcttttattacctatgtatatgtctataaacgtctatatattatcatatttttaaatatgaggtggtaccatgctggtcttattattttaacttgcttttgttttgagacagagtctcactgtttcgcccaggctggagtgcaatggcgcgatctcagctcactgcaacctccacctcctgggttcaagcgagtctcctgcctcagctttctgagtagccgggactgcaggcttgcaccaccacgcctggctaagttttgtattttttagcagacacagggtttcaccatattggccaggctggtctcgaactcctgaccttgtcatctgcctgcctcggcctcccaaagtgctgggattacaggtgtgagccactgcacttggctgctttttttttttttaatacaacctttaaaaatgttttgtgtttttggtttgttttgtttttttgagacgaagtttcactcgttgcccaggctggagtgcaatggcgtgatctcagctcactgcaacctccgcctcccgggttcaagtgattctcctgcctcagcctcccgagtagctgggaccacaggcgcccgccaccatgcccagctattttttttttttttttgtattattagtagagacggggtttcaccatgttggccaggctggtctcgaactcctgacctcaggtgatccacccacctcggcctcccaaagtgctgggattataggcgtgagccaccgtgcccggcctaaaactgacaaacttttaaaatatttgtttcatttaaaaatgacaatttattacaagttggtggagcgtagtggcgcatgcctataatctcagcattttgggaggctgaggcaggtggatcacctgaggtcaggagtttgagaccagcctggccaacatggcgaaaccccatctctactaaaaatacaaaacttagccaggtgtggtggtgggtgcctgtcatcccagcttctcaggaggctgaggcaagagaattgcttgaaccctggaggtggaggttgcagtgagccgagattgtgcctttgcactccaacctgggcagcaaaacgagactccatctcaaaaaaaaaaaattattacaagttaacataaataacattattttgaaaaataactttattttccaaaacaaacaaaactgtagaggaaagtatggacttgttttacatttttgtagttctctttgatgtctagcttactacaagacagctggttctcagatctgcattcagtttgcaatgtcacatgtcatgtagactttggaaaactccactgtatcctcatgagagaataagagtgaaaaagacaaattcatgtcttagaattatgaaaacagttttaatgcttgcaggggtcccaggaccacactttgagaactgttgtattagaggagtattataagcattagaataaatgtgtcaggcacatagtaggtgctcaataaatgatggttgttatcactgtgggtagttcaggaaaagagatttcgtccttagagtgtaccaggaagaataaagcgagcccagaacaaggtggggtgaggtgctaggcaagtatcagaacaagaaatctgaaacaggcacagaggctgaaaccatggtgcatgaaccctggcctgtgagctctgttatctgaacaggatctggtgaggtgaaggaaacagctcagagtaggagaatccttggttagccccggtccccatgacccactttcaatgaacaggaaaagcagctcaatatgaaaccctacggtggggaggggctgaggtaggaccacctgggaactcaggaaagagagctgctgagctcttagaccacaagaaaggctgagtagggaaaactgagtctgggactccctcagccagagctctgtgctaggtgctggaggggaggaggttccggtgttgcctttgggaagcacaccatcccatggggtatggacctgagatatcctggggagcacagtgaggagcatggtagggcaagggggaccagaagtaaactgaggcctgtccatctgaagtagccagtgtgtagaggtagggtttggagcaggaggggaaaacctagagagggcatattctgctggaggtgtgttctgctaggggccgccactgtggtgtgcctggatggacagagaatgccaggtaggggacctggggagtgagggaaaggttctggggagttaggattagtccaaggaggctggggaaagggaagatcggggttcaagtagagagccaggtttgacagcccactcccattaagccagtagttagttattgagcacctactagtgtcggggctgggggtgcacaggcaaatctgacattgcctctgccccttgaggtacaggaacacaaatatttggctacacaatgggaaaactgtgtgtaaagtgcggtgggttacataggagatgattagagaccaaatattgaaagccaccggggggatgggaagtttccaattatctgagaggttcagttatccagtcactagcatcagctagctcccaccctatggagcaaggaaggagctatccattgtggggcaaagaactgaactgaggacctctaaggtcttagatctctctcccttttctggggaaggggaggctattaagtgagaggagagaatgggcctagcccttgtccctgatttgtttcagtccttaacccaaaacctttccctcctcccagtttggcaacaatcccttctcttccctggccgggaactccgacagctcatcctcccagcctctgcggactgagaatcgagagcccctccctaacccctggagcccctcgccccccacctcccaggcccccgggtccggtggggagggcaccggaggatcggggaccagccaggtgcacccgacagtctcgaacccctttgggatcaatgcggctagcctggggtcaggtatgtcctaggatggaaggagcttagtggggtcaccagggcagcccctctgtcccaggactgaatggggttcatactgctccaggattttgaagacagaggtgagactatcraggccacagagggggctctgccgtctgggatagtggccgggtgagggctggttctggccatgtcctgatatccctaggagtgacctaagtaatagctcatgagtaaaccaggccccacttcctaagctccatgagcacctctggtattatccagtgtaaaaggttcagactgctgtggggagagggggctggagaggaatcaaggcagacctggggagaggcagatgtgaggctgggggaaagggatgtgcagggcttgccatgtacagaagaacaggttatgcactgcacaaccctagaggatgctccatttatctggactatgactgtacacatggcctgggggatgtcttcagcagatgctctaatttctctgcactctgggggatatcttgattgggaaagttccttccctctgtgtgttttagtttccttatttgtaaagtaaggactggaacttgatccatgattttaaaattgtgctcctgcatcctggaaaggtcttcatctccaggatgaggaaggacccaatgggagaggctgcagccctcctgccccagctccagccagaccattaacacacttggtttctgagtgagatttagcatgaggaaagggtctctgctgctaagacaagtttgatctagatgatatttaatcatttctttccaaattggacataatttgagcttatggcaggaacagtccagagaggcataaatcagacccagttcctagctggcttgtccttatcaagtaaatggaaaaggggccaggccaaagcagggcaagatgaccttggacttgggagagacttggactcatgccacaatcctagggtgcccactggaccattgcttttctgagttttgtagtcattcggtgtctgaagtaaggtagattgaagtgaggccttcggtttccatctggaccctttctctcctgttttctttttttccgccttgtcctagggatgttcaatagcccagaaatgcaagccctcctccagcagatctctgagaacccccagctgatgcagaatgtgatctcagcaccctacatgcgcagcatgatgcagacgcttgcccagaaccccgactttgctgctcaggtatgaaaccagcatgaggagagtattgttggggagagagttcctcttggttgrgggcagtttcttgtggtcaaaacactgtggagccagactgcctgggtttgcatcccaagctctgctgcttcccagctgtgtgagttaagcaagttatttagcctcccagtttctttatctgtaagatgataataacaatagttcctacctcctatagttgtgaggattaaatgagttaatacacgttaagtgcttagaacatggcgtgtgacagagtaagttctgtatacctggaaatgttagctgtcctcatcatcatcagacccagggctgagcaggctgactcctcatactcttcattacccagagcatagttccatttcctctcactgtcccacttaggccttcaggatactttgagatccccggagaagctggccagatttcctgcagtggtagggggtgcccagggagtctgaggctgtgggggaattcttagggtgaaaaggcccaggtctccccctgctaccttcaccctggcagatgatggtgaatgtgccgctcttcgcggggaacccccaactgcaggagcagctccgcctgcagctcccagtcttcctgcagcaggtgagtgaggagcctagatgggtggaggttgagggcaaggggtagtccctgaagcccaatgggtggaaatgaagttggggcagagcttgactctggactcctagttgaggttgtctcctctttcctgccacctcttgatgcctttctctgcttatttcccaccagatgcagaacccagagtcactctccatccttaccaatccccgagccatgcaggcattgctgcagatccagcagggactacagaccttgcagaccgaggcccctgggctggtacccaggtgagggtaggggggcaggagggcagcaaggttctagcaacttctccccttcaactcttctctctgccactctctcagcatcctttgtgtctctgagggtctgttttcctgtttcttccaactgcttttccttctggatctcacattctcatccctttcttggatgccatctcctacctcttggtctctcttgcctacagccttggctcctttgggatrtcccggaccccagcacmctcagcaggcagcaacgcagggtctacgcccgaggcccccacttcctcaccagccacgccagccacatcttctccaacaggggcttccagygcccagcagcaactcatgcagcagatgatccagcttttggctggaagtggaaactcacaggtacatgaggcagtgggggcaggtgctgggagcaccactttgatcctgggaggtttcaagggaagcaatagaatagaggcagtagggcaagcttgggagtcaggtcctgttctgccacttgctagccttgggcaggttactgatgctccctgagttcagtttgtgcagatgtgaaatagagatgagaagagtaatggtacttacccgtgcactacatactgttctaaatgctttagattttggagctcatttacgactcatttaccacattcctcacaatagcctcatgagaaagctattattattatttctgtgttaaagatggggaaaactgaggcccggaaaggttaagtggcttactcacttacatagctagtagataatgaagccaagactcaaacccaggcattccacctccagaatttacactataccatttctgcttatatcaaaggatccttttgataattaaagcagcccccatctctragactctggggagggggattctgcgaggtaaccaaagccctgggaaagtcaaggccaggggctggcaggaggggcagggatgacctacctcgagtgagcctcttaacctttctctgacctctgtgactcatctggaaaagccattcaaccaaaatgtatgtttacccagctttgtgcaaggcacgagagagctaaactaggtggtgtccagtccaggtgcaacccaagttaaattctgtggactggctgggcgcggtggctcacgcctgtaatcccagcactttgggaggctgaggcgggcggatcacgaggtcagaagatcgagaccatcctggctaacacggtgaaaccccatctctactaaaaaatacaaaaaaaaaaaattagccaggcgtggtggcaggtgcctgcagtcccagctactcaggaggctgacgcaggagaatggggtgaactcgggaggtggagcttgcagtgagccaagatggcgccactgcactccagcctgggtgacagagcgagactccatctcaaaaaaaaaaaaaaaaaaaaaatgtgtggactgtgataagaagcaacaaggagcacggaaagggctttctttttttttttttgagacagagttttgctcttgttgcccaggctggagtgcaatggcgcaacctctgcctcccaggttcaagccattctcctgcctcaacctcccgagtagctgggattacaggcacgcgccaccacacccggctaatttttttgtattgttagtagagatggggtttcaccatgttgtccaggctggtctcgaactcctgaccttaggtgatctgcctgcctcgggctcccaaagtgctgggattataggcgtgagccaccacacccgtccagaaagggcttttatactgcaagtcagggggccttagtgactgactttctctgtgaccccaggcaagtcctgtcttttctctggatcgaacattgttcctttcaacaccaggtggacggtgcttgctggactctttctagctataagagtcttttttttttttttttttttttttgagacggagtctcgctctgtcgcccaggctggagtgcagtggccggatctcagctcactgcaagctccgcctcctgggtttaggccattctcctgcctcagcctcccgagtagctgggactaaaggcgcccaccaccacgcccggctaattttttgtatttttagtagagacggggtttcaccatgttagccaggatggtctcgatcgcctgacctcgtgatccacctgcctcggtctcccaaagtgctgggattactggcgtcagccaccgcacccggccactataagagtcttttgttcataatcaaggcttgtgctttccaaataccccttgggcaaacatttacaggagataattagaggaatgacaagaatgaaaagccaagctagccaggcggtggctcacttctgtaatcccagcaatttgggaggccgaggcaggcagatcacctgaggtcaggagttcaagaccagcctgaccaacgtggagaaaccccgtctctactaaaaatacaaaattagctgggtgtcgtggcgcatgcctatcatcccagctactcgagaggttgaggcaggagagtcacttgaacctgggaggcagaggttgtagtgagctgagatcgtgccattttactccagcctgggcaacaagagtgaaactccatctcaaaaaaaaaaaaaaaaaaaaaagccaggccaggagtgtggctcatgcctgtaatcccagtgctttgggaggccaaggcaggggactgcttgaggccaggagttcgagaccagcctgggcaacgcggggagacccagtctgtaaaaatttttttcttttaaaaaaagtcttagtgcaagctgggcatggtggctcatgcctgtaatcccaacattttgggaggccaaggcgggtgtatcacttgaggccaggagttcaaaacccacctggccaacatggtgaaaccacgtctctactaaaaatacaaaaattagccgggcttggtggcatgcacctgtaatcccagctattcaggaggctgaggcaagagaatcgcttcaacccgggaggcagatcatgccactgcatccagcctgggtgacagagcgagactccgtctcaaaaaaaaaaaaaaaagaagaagacctagtgcagtggctcatgcctgtaatcccagcagttagagaggccaaggcaggaggatcacttgagaccagcctgggcaacatagcaagaccctttctctgctaaaaaaatttttttctttattttttattttatttttatttttttgagatggagtctcactctgtcccccatgctggagtgttatggcacagtctcggctcactgcaacctccgcctcccgggttcaagcgattctcctgcctcagcctcctgagtagctgagactacaggctcctgtcaccatgcccaactaagttttgtatctttagtctcggggtatcgccatgttggccagtctggtctcgaactcctgacctcaagtgatccacctgcctcagcctcccaaagtgctgggattacaggcatgagccaccacgcacttttgtttttttaagatgtactctgtcttccaggctggagtgcagtggcgcaatttcagctcactgcacctccgcctcccggattcaagtgattcttctgcctcagcctcccaagtagttgggactacaggcatgcgccaccacacctgggtaattttttgtgtttttagtagacatggggtttygccatgttggccagcctggtcttgaactcctgacctcaggcaaactgcccatcttggcctcccaaagtgctgggattataggcatgagccactatgcccagccaaaaaaaaatttttttttaattggctgggcaaggtggtacacacctgtagccccagctactcaggaggctcagagagaaggatcacctgagcccaggagatagaggctgcagtgagctatgattctgccactatattccagcctgggtgcaagaccctgtctcaaaaaaaaaggaaatacttctcttttataaataactgttgatcagtgaaacaaaattaaatagcttcttaactgggacccttctctagcctttcatatggctgtacgtgtgatgactattaggaggggccttggaggtcatgcttagtatgcatcttatttgaccatagaacatttggcttttggagtgcctgttaacatctccagtgtttatggaaagtaatgaggaatatatgctgatctaggcctatcagttatcttgaaaatctaaaaaagatatccgcctgccatattattacacagttttgtttgtttgtttttttgtttttgttttttgagacagagtctcgctctgttgcccaggctggagtgcagtggcgcgatctcgcctcactgcaagctccgcctcccggattcacgccattctcctgcctcagcctcctgagtagctgggactacagggcgcccaccaccacacccagcgaattttttgtatttttagtagagatggggtttcgccgtgttagccaggatggtctcgatctyctgacctcgtgatccgcccgcctcagcctcctaaagtgctgggattacaggcgtgagccaccgtacccggccattacacagttatttaggacttgggacctaggctcctgggcccccatttgcagctcatcttccctgccctcctgattgactctgaggatattagagaagacctgctggtcttagaaacccttaattcaaatagggccyccaagattggtcctgtgcccacttcacaaggcctgtcccctccaggtgcagacgccagaagtgagatttcagcagcagctggagcagctcaactccatgggcttcatcaatcgtgaggctaacctgcaggccctgattgccacaggaggggacatcaacgcagctatcgagagactgctgggctcccagctctcctaatccctcggcccatgcctcctgcctctcccctccctcgatgtcagcattcggttcttctgtcaatccttaccctctgcagcttgtcctcccttccgtcttctccctcatcctttccaaacagcagggtgactttagaggcatgggctccaaccccttagctctgtctgagaattatggttttactgctacgtctctaacagactcttctctcctggtctccttgagcagtgctacttaaacagttttcacagtttcattgattgactctacctccttgccccacaccacttttgcaatctttaaactttcagtggctgtgcagagtcgagggaggaaccagctctctggtttactggaacatagtcttccatctataccactagggttttgtcttatgtttacttttggtaactctcttccttctttttctccctaccccccaacccctagcccaaccaatgctagaatttctcgctctgaaggaggagcaggtgaaacaggtggtaattttccttctcggcccctattctggttcattcagcactttttggtgggaactgttggaaattccagggtaaggaggaagatgcctgttctccctgtctgaagagggagatgagacagctctctggacaggaattaacaaacgctggagcagcccagaggaaattgatgtgaaagaggagggaatgagattattcggaggaagggaatgggggagacagcctgagtaaaaggcttggaagttggaattarcagtggggagcagaagcactcatagctcttttaggcagaagaatccaggcccgagctggcagaagagacttagagatgctaatggaatttaaactgaaaaaaggagcccaatgaagctaagcgccacgccccacaaggggtcatattggctttagttcctcaagcatatgtgcttatatgcacacacacacacatttccatggacccaggtcttgcttgtgtccccaggcaccagtagtttgagcccccctcaaaagacatgaagggggttggggtctgtgtgagtagtggggaggtgcatgtgtatccacatgtgtgcatacactcttaagttgggtgggaagtggattccttgttggtttctggttcagagtgctctcccaccaccagagacaagtgggtaaaaaggtcagtccattgcaggaatatatatccgggagagctaggtcccttggggctctggatgctgggtaacccagaggtaatgtgggtaccctttctgaagctgtcagggctgtgactagcacccttatcacccctcactgccttgtgggaatagtagagggtttttttcctccagascccctggcctttcagttcttaactatttccctccaggccagaaagttttctttgaggaaggagaggagagggtggcaatgatgcctttgatctggaattggacatttctctgtcagagcacagaggaggctcatatcacctcttccctctcctacttggcccagctgcttggaggaccgaccccatggctgagaatatgacggcaagaggaacagagtttgctccaagtgggaaagggtcccaagcagtccagagaagatgtctgtgtggctttccctccctgcctcccccagctcccacactggcctttgtaaataaatggcgtggtctttgttgtgagagtgtgttggcgtttgtttttttgaggaagaagctggctgaaaacaacttcttggttttccagggcaagagttgtgatctagaggaatttgaagtttggttcagttactacagatgttaagaaatattaaaagtggctgagatcatgccattgcactacagcctgggcaacaagagcgaaactgcatctcaaaaaaacaagaaatattaaaaggttttagcctggcaacatagggagaccttgtctctacgaaaaatttaaaaattagccaggcatggtggtgtgggcctgtagtcccagctacatgggaggctgaggcaggaggaccacttgagcccaagaagtcaaggctccagtgagctgtgattgcgccgctgcactccagcctgggagacaaagtgaaaccctgtctcaaaagaaaaaaaatatatatatatatatatatatatatatatatatatatatatatatatatagaaggttaagggataactgatgatggaagtatcagtaatatatgacttgggaatggggaggactgcattcttccattccccatcagaccattgggtatctgagatctcttcccctacttccccataggtcaggtgtggtagaggaaactgaattgtaagattattgcctccatcctctgatcttttggcaagattgccctccccttaccttaggttaaaaagtaaaacaaggctgggcacagtggctcacgcctataatcccagcactttgggaggctgaggtgggtggatcacgaggtcaggagttcaagaccagcctggccaagatggtgaaaccctgtctctactaaaaatacaaaaattagccaggcacggtggcaggtgcctgtaatcccagctactcaggaggctgaggcaggagaatcgctggtaccagggaggcagaggttgcagtgagcctagattgtgccacgcactctagcctgggggcgacagagcaagactccgtctcaaaaaaaaaaaaaaaaaagtaaaacaaaaactcttgcagtcaggttttatgccagtgaagtttggtagttattaatcttgagctcagactaaacctggcattaccactaatcatgtaagtttgaggaagtcttttcacacctatggggttttatcttttgtacattgaagttatggactacggttctgtggaacatgaataagccaagagtgggaggttccactttgataatggtatactagatgcctgagaccgatactctcactagaaattttaaaatctgggaaaaatacataaaaaatggaaaaagcatcaaagagtgagtaagactgactggaacccagaggggaaagaaactctaaagactggctgcctttgacctggaggccagttaggaaaaggttgctgagaggctgagctgtggttttttttgttttgtttttgtttttttttttttggttttttttttcaagatggagtttcactcttgtcacccaggctagagtgcagtgatgcaatctcggctcactgcaacctccccattccaggttcaagtgattcttctgcctcagcctcctgagtagctgggattgcaggtgcccgccatgacacccaggtaattttttgtgtttttagtagagatggggtttcaccatgttggccaggctggtctcgaacttctgacctcaggtgatctgacagcctcggcctcccaaagtgctgggatcacaggcgtgagccgtcgcgcccagcccatgcccagctaatttttatatttttttgtagagatgggatttcaccatgttgcccagactggtctcaaactcctggggtcaagcaaggaaggaaggagcaagcaaacgggatgttcagagagataaagtggggcagggattgaatacatctagcaaaaaaacaaaacaaaacaaaacaaaaaaaacctggaatcatcaggctcacacatgccattcacaaaaataaaatgtgctttatttctaagcggaaggattacactctgctcttctggcttctgcccagagctttccttggagccccgtggagatctggaccatcacccattagtgaagctcacagctgagtcagtctcacccgggctcctccttgctccagagtcggatgccttgttttcctccactgacttctgcttcctgtggcagcagctacataagtattggcaaaaacatggacagacaacttggtttcattggtggataagctcaagccactttccaagatgctcaggtgctccttgtgcctcacttggcggattcttgagtacgggcattgcctctgtcctgtcctaggtgattgcaaagaggtagggggcccctctctctggtcctcctcctcttcctcatcctccttgtcctccttgtcttcctctttcacctcatttttcctcatctggagaatgcaaaccttgttctgcttccgcctcttcgtctgaacaaggctgggatcttcttccttgggggaatccaagagcaaggaatgaagcatgctctccaccgacccatcctgttacatatgggacttcgcctctgtcgttggcggagaggcgaagtgccgcagagaagcatggagatcacagagcaaacctaaaccaagcgcccatctctctgtgagaactgagcagacagcagaggttaaaaaacactgtcctggcccggaagacacgttcacttaaaatactaaagacaagctacaaagcagtatctgcaaaggatacacaggcatatcctgaatgcattaaacgttcattctttttttttttttttttctgagacggagtttcactcttgttgcccaggctggagtgcggtggtgtgatctctgcttactgcaacctccacctcctgggttcaagtgattctcctgcctcgccctcccaagtagctgggattacaggcgtgagccatcgcgcccggccaaatgctcattcttttcaaagggttgtaatgcaaatatttaggttaaataaagactcattttggccgggcgcggtggctcacgcctgtaatcccagcactttgggaggccaaggcaaggagatcacgaggtcaggagttcaagaccagcctgcccaatatggtgaaacccccatctctactaaaaatacaaaaactagccaggcgtggtggcacgtgcctgtaatcccagctattcagtagactgaggcaggagagtcgctgggcggcagagcaagactccagctcaaaaaaaaaactcattttggaaggcaaataatcacccattaatttatctgctctagaaatcctgcttgttcatatttgaacaatcctgcttgttcatatttgatggatacgtttattatcttcattgtggtgatgatttcatgagtatatatatatatgtcaaaacttatcaaattgtacactttaaatatgtacagtttattgtgtgtcagagctcaaaagcaaaaaacagctagcatttaaaccctccctcaaacagacaattaagaagttcctccatcctggctaacactgcgaaaccccgtctctactaaaaatacaaaacaaaaaaattagccaggcctggtggcatgcgctggtagtcccagctacttgggaggctgaggcaggagaattgcttgaacccgggaggcggaggttgcagtgagctgagatcgtgccactgcactccaacctgggtgacagagcgagactccatctcaaaaaaaaaaaaaaaaaaagaagaagttcctataccaagtgygtttaagagcatatgagtattgaaaggatattaggaaggactaataagaatcgagtggctaactgggaggtggttcttttgtgtgtgaactcttgagccaaactgagctcaaactctagcatctttgctttctacttatgcggtcttgggagagttattcaacctgcctgtgcctgagtttgttcatctgaaaaatggggaaaatagtagcacctgccttataggattgttatgatagttaaatgagatgtaaattcttacaaaataccatgtggtaagtactcaataaatgttagctatgattactattattgttgatattactattattattggtggtggaatttttttttctgaaagtggtaattctgttttgttttgaggcaggatctccctctgtcacccaggttggagtgcagtggggcattcacagctcactgaagcctcaacctcccaggcccaagcaatccatccaactcagcctccaaaagtgctgggattacaggcgtgagccaccgagtccagcctcaaagcaaatttgagccatgttttagtaaagatacgaatcaaaagcatgtagagaatgcacgggaggttgccacagtatttcttagtgagctaaagtgctcaaatgatggtagaacaggggtgcaagacctgaggggtgggagggatgcagggtggggcacttacactggtcagctcctgactcccttggtagcccaagtcatcaatgaagctgttgatggatgtcaaggatacagcaaatttgttaaaggagggattttcttcccctgaagccccccaagcttctttgatctcctaagggagaggtggagagtccaattaagagtggaacagcccatagctgggtgtggtggtgtgcgcctgtaatcttagctactcaggaggagttagaatcaatcaaacccaggaggtggaagttgcagtgaaccaagatcacgccactgcactccagcctgggtgacagcatgagactctgtctcaaaaaaaaaaaaaaaaaaaaagaatggagcagcccatatcctgagagtgacactgtaaaataaataaacaccaagcagaacttcaggaatcaccctgcccttgctcctggctgtgtcccataccctgccggctttgagagtcgataaaggcccattctctttctttttttttttttctttttttgagacggagtcttgctctcgcccaggctagagtgcagtggcactatctcggctctctgcaagctccgcctcccaggttcatgccattctcctgcctcagcctcctgagttgctgggactataggcacccgccaccacgcccggctaattttttgtatttttagtagagacggggtttcaccgtgttagccaggatggtctcaatctcgtgacctcgtgatctgcccgcctcggcctcccaaagtgctgggattacaggcgtgagccaccgcgcccggcctggacccattctctttcttcttcattatcatagagctctatgatcactaatgccatgagactggcatgtccccctccctccctcaccacacattcacaattctttactcccggagtcctcacggaagtggttgtcatagcaacaggagggtagggtcctgggcccatgggttcaaggagggctcctctgaaggatgtgagaggccacatgtgcacatgcatgcacacacacatgcatgcacacacacagatgcacacgcacacgcacttgcacacacatacacacacacacacacactccttcgtcactcttcagcaagaggaggctgggcctgctcaacccctcccccagctcccacctgggctaatagaaagggagaagaggagacggtggtcaaattctgaaaatgggatgaaacctcaaaagacatcaagacagcaggtatagattccagaatccaccttggaatttgcatgtgttggggagaaatttggcaagaagcagaaaatagtcctccatccactttcaacttggggtggccaggtctgtccaagattttcaagtgatcccaggacttagaaaggacccttcagagtctgtttcaggagcttgagctctttctgagccttctccgctcctctttctactcatcctctcagtagccaaagttcttctatctaccatgcatttctcctttttctccatgctctctctaggggagaagctcatttggtttagtctaaactttattggtcaaatacaatgctgtaatatgcgattcttgg

SEQ ID NO: 8703 - DNA, 26232 bp, Homo sapiens
ttagatgttgtgcagatatataatgcttgtgtcagaattattataatattgataataaactttagatattgcttcagagtgtgtgaaatattttataaatatttgaggtcctcaaaaatttcctcaagtatgttaatacattattctcaaattattttacaaaataagaaaactgaaacaagtatatattatcattccattcattgatttattcagcaagaattaactacctacctactattaattatgtttcagggactgtgctaagaaaagtgagagagatgtataagcgattcatcatatcaacgtaacaaatgcaaaaggatctataagaattgaatattccatttttaatagtagcatcaatttcagactatcatgtttcctaaaactttctataatgccagttatgaaagttttaggaaaatgcaggcatgaaaatgagtgtcttatcttctcagaacacctgctagttgtgctggctatgatagactcttggctcaaacctcatctatacatctttgagatgagaactgatctcatactattttttaaccacatttgacagagtcatagacagtgaactgtaatatgaagtgtaataaagaattcagagttattccttttaaaaaaattatcttgttgacaacatgtagtattttccagctattacattgatattttgaatgggcacaagagatataaagacctaagcttagaatgcatttatttattttttgtttatttatttatttttgagacagggtcttgctctgtcacccaggctggtgtacagtggtgcaatcacaactcactgcagcctcaaacccctggcctcaagcaatgccccaccttagcctttcaagtatttgggactacaggcacacaccaccacactcagttattttcttttgtaaaggtggggtcccactacatttcccaggcttgtctcaaactcctgggctcaagtgatcctcctgcctcggcctcccaaagcgctgggattacaggcttgagccaccatgccaccctgcctaagctagaatttaaacaatgagattcatgtttatcttaggttgagattcttcaaaagcaaagcctaagtcaagacattggtgcaattatattttcaggacacagtcccaggaagcaagagtgaggtagcaagaagagtgagtcaaagaatgaggaaaagccaatacaattatgtgttatcaaggtttctgctatgggcaattgaagctcaattccaccaggggcctctgagaagcctgcagaccagcttccagtcgttcacatctccagtgagcaggaggctggaacattcatccttcagtttccattccccattggatgaggatgttccctgagagtgttaacttctttacacttccaggctgtactgtcatgctgacctggaaggcttgatggcatctcaatgctctgggaagaaagcaaaaagacacacagtctgtgcttaaagttgtattaggttggtgcaaaagtaaccacaattacttttgcactttgtcagagcaaagtgagttacacaaaccagtccaccccttgtgcaactaaattaatgctgtgggtatgtggcagaggacatcagaagaatctcctacagctttgttccttggagatttaaatgatgggaaattggatgagctttctctggagtaacttaccagcctcagaaaaaaaagaaattacagataccaacactggagaaatctcagtgtggcagggctgctaatgacctatcttaaccttcagtctacacttcttctgcagtgagactccaatttcatttgaggtagcaatgcgtcatattttgtagccttgcttacagctaggcttacagctggatatggccatgtgtttatttctagccaaaatgtgtaagcagaatgttgtgtggggcttctggaaagggactggaaaattactttttctctgccttcctccttctttctgcctgtaatgcagatgtaatggctagaggttgagaaggcagctgactcatgaggcattgtactgacagagtggtgtagcaaggtagatgttgcctacccttgatgatatggagctgtcaaacaaaccctaggcttccaaatctgggcacttttttttaatgtgaggcaaaaatacatttttatttaactaagcatctgttattttgggtttttgtgttacattcaaccaaatctcatcctgactaatacatcacatgaagggtgtgggaagtgccccacctccctgcagtgaaggtcatcaattcaccatccctgcctctacacatgagagcttccagtctgctttcttgcctctcattcttaagcagattgcacaacacaaagtcaccaaatatttttgaaaagattgcagtgtgaaaaacagagaccaaaggagagactttgaggaactagagacaattgtaggagcaaaagaaaatgtcgaaataaactaaagtatacttaacattaacattctttaaaaataagaagagactgggtacagtggtttgtgcctgtaatcccaacacttttggaaggctgaggcagaaggactgcttgaggctcagcattcaagaccagcctgggcaacatagtgagaccttgtccctacaaaaaaataaaaataaaaatattagctgggcatggtggcatgcaactatagtcccagctactcgggaggctgtggcaggaggatcactcgaacccaggagtttgaggctgcagtgagtcatgactgtgtcaccgcattcgagcttgggtgacagagtatgccttcttttgtttatttaaacaaacaaataaataaatataagaattaaatataagaatataattttggatgtaaaatatgtcttatttatttaataatttcttatttatttagttatgaattatgtattattaattatttagtaatttatttaaataaataaataagacatattttatgtccaaaaacactaatgaaatgcaaaaaaaaagcttaaaaatgtaaaagaatactcagaactggaaagagttcttggaaattaaatgtcttagctgaaattaacaatcggtgggctggaaagttaagttggtagaaaataggatatattagaagcataaagactcaatctaggaggtccaacagatatggaaagaaagaagagaaaatgaatgggtagaaaaggagaaaatgaataggaagaaattataaccaaaactatattggaaagttaccttaaattgaagtttccatgaaaaaaaggtccacttactgtccaaaaatgttaatacaaaagacctacatcaagagcataactataaaatttataaatatctaggtaaagagaagatttccaaaacctttcaaaagaaaaacatcaagaatcagagtataaaacttttcaacagcagcactagagtctggaaaataatggaatcttcattatccttcaaagttctcaggcaaatttattttagactgaaattctgtatccagtcatacaccaatcaagtgtgaggatgaaataaagggcattcttaggtatgaaaaaaatcagaatatttattttccttatattctttcttagaaaactcctgagagacatgttgcatcaaaacaagggagtaaatcaagacataggtagaagtgaaacccagtagccagagatctaacacagagacacaatacaagttttctggttaatgagaggatgacagttctacaacagacccagactggagaaggcaagcaaggggtctcagagggatgagttcaagggaaaaaaactgctgctatatttcctgtcatgtttggttattctgagagagtttaagagttctatggaagaatttggtaaagaattagcatataaaaatcaattcaactatcaactgcggagaaaaaaggctatacaagaaaggagatgtaaggccaggcatggtggctcacacctgtaatcccagcactttgggaggctgaggggggtggatcacctgaggtcaggagttcaagaccagcctggtcaacatggtgaaaccccatctctactaaaaatacaaaaattagccaggcatggtggtgcatgcctgtagtctcagctacatgggaggctgaggcaggagaattgcttgaacccgggaggcaaatgtcgcagtgagccgagattgtgccaatgcactccagcctgggtgacagagcgagagtccgtctcaaaaaaaaagggaaaaaaaagaaaaggatatgtaatcatagtatactacgtgattctcttgtgaataatattttcatggtcataattgtatgaacgctgattacgggcttaaacattcctataaccaaattaggaaagcagaaggagtgttaagtccttcttttccataggaagatgttaataataacatttaactttgaaaactcgagaaatagtagcataagcacgttatttacaaatgtggagttaaacataaagataaaaagctataaaaataatttaaagaagttacctttggggagcaggacttgaaggagcgaaaggttagggcagagagatgctttttcgttacaacaagatagcaccatttgacttccctttttctggtaactctatttttttttaaattttgttctgaaatattttagagtttaaaaaacacaaaagaacaatacaatgagcatacttgtacttagcatacttgtacttaataccattataacacaaatcctgatcatgtctgccttctccccttcatcccattgctccagaggccaattaaacaatttaaactatatacatatattaaaacagtaaataataatatttctgaaacaagatttataactgggatgagctttaaatgcaaaggaagtatgtatctacttagatcctataagttcctcagctatgccatataaattttgtttaggatatggacaaggaagatttagaaaggtgtatcgattgaggagttaacatttgggaagaaagggaagaaaattttaataattggtagaagaaaaggggaggacaagtgagggaggacattgctgtaactaagactgttccttcatctaaaagtagcccaagtaaagaagaatatattgaaattaatccaaaaggctctcactaactatattctcacttctgatgttaattttggccttcatcatccatgacctctatgactcttcatcttcccagtcagctgtcttgtccatgagaccctccatcccatcttccatagctgtctacatatgtattttgttccagtcaggccagatttcctgcagcttatttctgctgtgttacctccttcccatggcctctttgcactcatacttcttcttccttcctctgtaaatccaaattctacacattctccaaaacccagagcaagccctagtgcaagccccagtgcaggctgtatttaacttgcataaaacctcaaggccacactcataagcaatgatctgcctttggcccttcttagtctttacaatctgcactgtgtatttgcccacttgcctcctttttgtcctacattaatttctgtatgtgtctgaattctccaacaagattgcattcacaggggcaggcaaacagtaggaattcaataaacatttgaagtttatcttagttaataagggtaatctgactcctgattcatttgtctttttatgataacatcctaccaagatattctgagattgccttcaaaagaaaactttgcaaggaaaaaaaaataacttggaggctcacttcccagtatattcaattcagtaataagcactaactgtgtttactaaacaattgcaggccaagattacaaaatcagctcagtcaaaaaaaaaaaaaaaaaaaagcaaatcatgacacactttatggcaagtgtccctttctgttattaattaaatgatgatacaagccaattcatgccacgtctcactattatttkctaaattctgtgctaacagaaccgkcttcagctgaagaaagagaggaatgaagcgccttctgcttctgtttttgttctttataacattttcttctgcatttcccttagtcyggatgayggaaaatgaagaaaatrtgcaactggctcaggtactgtcttaataaatgatatcgatgactattgataaaaagcttattttattgattctcttgggacctaaaaagaaaacacattcctgcaaaagagtcctgaacttttttgtgagaaggaactgcttttcatttgtctatctctgacgatatcaggaaattgtgttggggaggagggctggcacagggagggggaaaggatctgctataacttttagcaatggtcacaaatgaagggatgtttagtgcgaggagaaaggagagagccctgcaaggtatggagatcactataaaagcatttcaagacaaccaggaggacccaatctacaatttggagccctaatccctatatgtatgaaaaaaaatacattgctttacagattccctctaaaaatcagttcagttaactttttatttttggttaaagcaaatacatgtgcaaaatggataatcacttatttatcctagaacttgtttcaaagaaacaccaaaatgaaagtaacagcaaaaatatgtaagataggtcatcattcaacagacagacgaagcttcattctcttctgtggaggtttaagagctgcgtgctttggctaattctggtcactcataagtcaaccaagtcttggaaattgaaagagcagggtgactcgttattttcctctttgtgtccttcctttcttctttcctccttcactcctcactttctctcattacttcttttttttyccctttcctattgccagaaggaattttaggcaattttgctttatcctgagatggagatttgctctcctgtagtctgtgcctcttttttttttttcttatctttttggtcaggcatatctcaaccagttctactctcttgaaatagaagggaatcatcttgttcaaagcaagaataggagtctcatagatgacaaaattcgggaaatgcaagcattttttggattgacagtgactggaaractggactcaaacacccttgagatcatgaagacacccaggtgtggggtgcctgatgtgggccagtatggctacaccctccctgggtggagaaaatacaacctcacctacaggtaatgcttctgccagcttatttccrcctaatccaaaggaacataaagataatttccaaggaacagaataatattcattcaattgactgagcacttcctgtgtgcacagcacatcwtaggctccatttacggtatcttcccaacaaacctgtgctgtaggctctgctgctaccaccaycttaaatacagagraactgaaacaaaagtttatttaccgtggctgaggttacacagctcttactggctccagcagacatgctctcatctctagcctctgccaccatcatataagctcccaacaaatactgtcatctgactgcagatacttgacagcatgaatgaagggtgcccaagagaaaatggggagaccctggaacacaaccagtttatgtcagagacatgtgtgtgtgagagagagagttgccaaatctcagatgagcccctcagagcaaagtagggtgtttccctcagacatctcaaggaaaagggggcaggctgactcattggcaggaagaggatgaggtatgcctttgatctgagacagagacagtcaccttgaccatcactctacagcctttctgatagttcttctttcatcttactgagtgctaggacttgagataaaaatgaatttagcaagataggcaacataaacgagaaaaawcttttcctgagcaattcttgtggttctcatgtaagattcttaatatatggactgggtgtggtggctcatgcctgtaatcccagcactttgggaggctgaggcagacggatcacctgagttcaggagtttgagaccagcctggcaaacgtggcaaaaccccatctctactaaaaaacacaaaaattagctgggcctggtggcacgcgcctgtagtcccagctactcaggaggctgaggcatgagaatcacttgaacctgggaggcagaggttgcagtgagcygaggtcgcgccactgcactccagcctgggggacagagcgagactctgtctcaaaaaaaaaaaagttcttaatatatggyacatgcacaagactgatttctacaagccattcaaaaaaatgattctcagttctttttaagaatgtctttataatactttcatatacaagccaacacgtacatgagataaatgctgtcttgggatgtgatcttagtraagtcatttaacctctttcagcctcctttgttgaagtgttaatactactgattcatagggaagataaaggaatttaattctatagtatatgtaagagtatttcatttaaataaagtgctaatgcaactgtaagataattgcaccacaccaaagttactgcagcacattattgataagctagaaatgttttttgtarttatgtgtgtatattcatgcatgaataagccagaaattgacatatttttgttaatttttaagaataataaactatactccggatatggcacgagctgctgtggatgaggctatccaagaaggtttagaagtgtggagcaaagtcaytccactaaaattcaccaagatttcaaaggggattgcagacatcatgattgcctttaggactcgaggtaaggttttcaacagagagcaaagctatttttatctcaggagatttgaggaagctgatcttttttcctcgcataaattgtatctcagtccatggtcggtgtcctcgctattttgatggtcccttgggagtkcttggccatgcctttcctcctggtccgggtctgggtggtgacactcattttgatgaggatgaaaactggaccaaggatggagcaggtgagtctaattttctttatgaacaaaatcttrttattctaaagaatccctgaaaagaatagctttgtaactagctgctttttaactvtaaagttcccaatgtccccacaattttccatattccaagatgaccttgatggaagtgttcaatacaccctcataaagtkgctacttctactatgatcagagcagtcttcattatttatacattcattcatrcacccataatgtctgaggggccactgtgtgcccggaactatacaaggtgtcctatggaccccaaagttgtactagaaaagtgtaagccttcagaggttcatgatcctgtgtggtacacaaggccagcccacatacctgccatataaggcagaagatgttttgtgttgtaccagtggcagaagtcatctgttgcttgaggattgaaagaagactctagggaggtggtaattttgagttagcaattaaaggacagtatatggattcatagcccatagaggctctaattcaaagcaygaacttcctcttctaactcttgcccagctgcaaaggaatcagaccttaatccttatatttgacttatttcttcaaaccaagtaagtttattttatttttctcaatgggtctgcctggcattcaaggtgttttactactgttcygacaaaaatatcaaactgtactatattaacaggtagcaatgtaggcctcaaagaaaagagcaagctcaatagatttttgggtcccccattcttttgttctgtcattggcaatagttaccttgggtctggtgtctagcttccagagtcacaggaaagcacaggttgtagtggtcctgatggatagtatacaaggacacagatcattccygaccatgtatctccagataatcggtctagatcagctttgcactttctgtgaaactaaaagtctgtcacacaaaatggtccatggccactcactgctcagtcagaacaggtgatgcaactgtttttccaagtgccagtgaaaagggcgaaagtcagtactggctgaggttcaggcagcagcaggcaaaatctgggattggctgctgccattgccacatgacttagcatcacaagcagacaagaaattgaaggaggtaagataacattgtcacccaagcaagagaggaaaggaatgaaccatgyctgttgtgtatcttctgctgagacatgtttcaatatttctttggtattagtctgaagacactgcgggtgtgtttcaycaaacagttacaggaaatatcctagcacttgccaaaatcagaatgactccccttgctcagccaggctttactttcatagctagaggcagagatcaaagatttcactatccttttgtctcttaaatccaatgctaagtagcagttmctcttacccatactgctttaagccctctgccaagggggacatgtggggtaagttatttttttttaagtccgatgtatctgggttccacatcggtaaggctcgcttgagcaaggcaagagataaatacagtcctcaaccaagttctgggtgggcaaccaggcagcagttccaaaaaggattgtcttctgaccactttatttcagyccctcagagtagaaattgtgggccctctgtgatccaattgtataactcttagttcactgacattaaaggggaaaataycttcctcttctccaatggaaacataaaatatcaagcaaacgtaatctccaacaaaattgcaatttttaaaaaataggcaattcagcaataacctatatgatcacctctttcattgcaatgtggaggctctgttttatggaagggtggcaaaaatcttggtgtaacttgcttaagagcaacagacacatcatctgccaatgatgctattaagctgcttcctccgggaagaacaggtcatcgcatggggatgtcagaggactttaagcacatacagagattttcctgagagtctctcaaagcaaagccaggtgccaagcctattgtgagtgtgtgtgtggcacacacgtgtgcaccaaacaactgaacaggccttacagactgctacagatgcagtgttgggaaggagaaaaagcaatggtttgtagtttggcagacactggttcctttcagggcttcccattgaccagctgagggacccggggcaagtcaagtaattttcttactctctatttctttgcctgtaaaagagtaatgatgctcttcttttaggagggtgaaataaattacccttaccctaactagrttaataaaggtgaaaacccctttcagagcagttgtccatagtgaacactcagaaagtgcttgacatcaaagattctgttgacaattgttagtattgatgatgataatgataactagggtggaattacattctaggcataaggaaaaatatttgaaaagctatgaatgtataatgcacaaatttgtctatttagtcacatctccatgagacagagacttttgtcatcttttacctacagcgtcatatggccaataacagtgttgtcacatgagaaatactctacaaatcattggtaaataaagtcactcaatgrtcatktattgaacatccactatgactmaggctctgtcataaaaatgaaatatacccttgtatataggacacagaagctgccctccagggcttcacwgtctaagggacacatagacaattaaatggcaactaaaatcagtaggatcagtactgagatamaggaaactatggcaatgtaataggtcctcacagaagaaagtccaacccagacccacaggtcagcagaggaagctatgtcaagcctgagaactggaggctcagcaggaactaagaagacaaagtagggtgaagagggtgaataggagtgttctgaacagaatagctcaatccaacataaggaatagaattgtagaagacaaggctaaaatggygaataggattcagattacagagggtcttgaaagccagaataaagatctggacttcatttagaaaatctgagcttgaattatttttcccaacagtcatttttccagttccttgtccaaaagcacacacagtgatatagccagccaggcaaggggcagcaacaaaggcaagagcagaaaagtgtcaaagaccatgacataattctttgcccttttacgtttgcttcatgcaaacatcactaggcaaatttccatcagggaagctgaggttttccttaggctccatgcacttagttgcaaagccagggatggactttatgtatgtatgtatgtatktatttatttattttttgagaccgggtctcactctgtcacccaggctggagtgcagtggtgcgatctcggctcactacaacctatgcctattggactcaagcaattctcctacctcagcctcccrartagcttggactacaggcacaggtcaccttgcctggctaattttttttttctttagtagagacagggtttctccatgttacccaggctgctcttgaactcctgagctcaagatatccacccaccttggtctcccaaagtgctgagattacaagagtgaaccaccacgccaggcccaagagggtggtcttctatacttagagccttacagactagtgggagaggcagacaaagacaaaggcaattctaacatgcctggtaagacttctggaaagggcactatggtcatgtttaggaaacacatctaaccatttttgcattagacaacacttggacatccattaatcattattaagcagtcacaatcactaggaataaaagataattaagacatggttcctgtactcagggtgacagaaacaaacaatgcagtccttacgggctatgacagaatcaagtgctgagtctgtggaagctggagccatgcatttaactcaacctggataagacctggagggataagggaagttacatgaaggaaataactttagaggggagtcctggggaataaataggatagttaagccargagaaagtggaagagatatgttattagcaaagagacaaaggtatgaagacatagagattagaaagaacctgacacagatgaaaaatgccagcgatttaacatagttagcttgcagaatatgaaaataaaatataaggctgaaaataggcagggactagaccatggaaggtcatgtgaakgtgtttggactttatcctatagcaatacagaacctctgaagaatagaagtaggagcaacatgatcacatatactgtagtctagcaacaaccccaaactggtggcttctttttttttttaatattatccatttctgagacaccggtttcaagccattttcttaccctaggctatatttttccatgatgtgactagtaccaattaaagttatgtgccatttaatcatatttkggtcaactatggactatggatatgacagtggtcccattcgattatgatggagctgaaaatttcctatcacctagtgatgtcacagcacaacacattactcacatgtttgtggtgatgttgatataaacaaacttaccgtgctgccagtcatataaaagttcagcacatacaattgtgtgaagtacataatacttgataataagcaaccatgttactggtttatgtatttaatgtactatacctcttatggttattttagaatgtactcctacttgtacaaaaaaaaagaaagaaagaaagaataggtaactgtaaaacagcctcaggcaggcccttcaggagggattccagaagaaggcatygttatcctaggagatgacagctccatgcctgttattgcccctgaagactttccagtgggacaagatgtggaggtggaagacagtaatacggatgaccctgatcaaaggaaggaaatatttttgtacagctgtacracaagtttgtgttttaagctaagtcacaataaagtccaaaattttaaaaatttaaaagtttaggccaggtrtggtggctcacacctgtaatcccagcacttcgaaagaccaagccggaggattgctttagccyggagttcaagatcagcctgggcaacatagtgagacccccatctctacaaaaataaataagaaaattagctggacatggtggcatgcwcctgtagtcccagctgcacaggaggctgagggaggaggattgtccaagcctaggagtttgaagctgcagtgagctgtaatcacaccactccagcctgggcaacagagcaagaccctgcctcaaaaaaaaaatttataaagtaaaaaagttacwgtaagcaaaagttaatttattaytgaagaaaaatatttttaatttggtgtagcttaagtgtctagtgtttatayagtctacataatgtactgtaagtcctaggccttcacattcactcaccactcactcactgactcacccagagcaayttccagtcctgcaagctccattcatggtaagtgtcctacatagctgtactattttttatcttttataccatatttttactgtaccttctccatgttcagatatgtttagatagacaaatgcttaccattgcgctaaataattgcttaccattgtgctacaattrcctataatattcagtacagtaacgtgcaatacaggtttgtagcctgggagcaagaggctataccatgtaaccttggtgtgtagtgggctgtgccatctaggtttgtgtaagtgcaccctataatgtttgctcaatgatgcatttctcagaacatatccatatcattaagcaacacatgacttattagcattgcaatacctcccagataaatggtggtacatatgagaattatctgctgtatagcaagcctttatttcattccccttagttactttctaatctcasatgcagccattctctttttgattaagtcatgtgctcgtgttttccctgttattatcaaggattcaacttgtttcttgtggctgctcatgaatttggtcatgcactggggctctctcactccaatgatcaaacagccttgatgttcccaaattatgtctccctggatcccagaaaatacccactttctcaggatgatatcaatggaatccagtccatctatggtgagcaaaattataaatctcaatatatgtgaactaaataggaagcttttcagaaaggaagttaagaaaatcacttcttgaaatattatcatgaagcaaatatccacttaggtaagacccttgtgtaggcatatttcttcatgccctcttaattcattgtggtattttttttctcatcaaaggaggtctgcctaaggwacctgctaagccaaaggaacccactataccccatgcctgtgaccctgacttgacttttgacgctatcacaactttccgcagagaagtaatgttctttaaaggcaggtaaactcatttmtctaaacacctcaacttcctatgaagatttttcttttcaagagatttgaggataaagaggtagtcatggggctagtgaaaatgtgtgccttttatcttcattttataactgcctatactgtttgaatgctttaccatatgtgtgtmtcttgtagttgtttgataaatttttaaatgtctttaaggaattttaaaaattgccattgcataagaaagggaaatagagtccactttcagtgactttttggccagaagagtccaccaatcccagtggcctactgaagccaacttacactccgttacaggagtctattgttaaattttcaggaattttgcaaaccagttcacatcacataggcagcttgaaattggccatggttggagtatttacatctgaaaatcagcaaatgattaaagtcatgtcttcttcccacctggagagccagttgttaaacatgggtcagcacctcactgaacgtttcttaaagttgcatcaataaagtgttagctgtagtgggaaatcccttctctcactacaatttattgaacttaagttacagcatggtgtgtcagttatgtagaccatgaccatatttttatagcaaaataccaagacatacaccattgacaaagatataggggcaaaaggaaagaatatttgaaattggactcctttcwcccatgaatatatcgygttacaatcacatgttatcaccaccattctctgaccagcagaggccaagagctacccaccatgaatgtcacagaggagtggcctgtatgtggagggaaatggaatataaggacttttcacgtctcattcatagactcagaattttgcagccagaagggaaattctgaagaagtattttcgcatgtcagtgattacatttctttattccagcaagcatctgcttcaaaaagttcctcttaggaatgcttggtgttggcttagaatgttgggtgttgctgctttggcaaaaacaaaaccattgagcactcagaactcagaataagatttccatgatgagtttgccactctacggatccaagagtgggcacaaaggcatgtcctggacttggaagtcccaaactgaactgaactcacaatcacctaaatttactggggaaaattatgctaattatctcaattatttgaggaagataccaaccaattagctaaaaggcaagcytaagattacaaaattctcattgacatggaaataggctgcawgtgtaaagtgttttttgtttaacacaggcacctatkgaggatctattatgatatcacggatgttgagtttgaattaattgcttcattctggccatctctgccagctgatctgcaagctgcataygagaaccccagagataagattctggtttttaaaggtaacctggcccatcccgattcctcttctccctctggctgcctgaactaaccagtggatattttggtgtaagaaataaaatcttcatgcatgagccaaggcgcagggcttttgctctcatcttaggttcctgtcgtaaagaatataaataaccaggattctctgtggctgtgaagataaacacaatcctagttgcacagggactaaaataaacctgtgtgataaaaactaaaaaagtctctttttctgccaaataaaggtaattaatctgtctttaatgttcactttttactaaggttgccagatttggcaaataaaaatataggacactataaatttcagataaacaacaaataattttttggtatatatatatatcccttaaaatattttgtatttatttataccaaaagttagtcattstttacttgaaatcaaatttaactgacattttctgtttaatgatcatgatcttatcagattactagcctttgagagcacttgggggctgaaacttaggagaacatgtccaaacatacttcattttaaaaatttcaattgacataataattgtacatatttatggggtacaatgtgatgtttaaatacatatatgcattgcttacttgattgttttgacagagttagccaattaaaagcaatcaatgcaatgaaaccaattgacaaaggtacgcatactattgacttttacaggtatatattatttgtgtaatataaataatatgagcagctaaagaaagtggtaggaatgaatgtggacataagattattaaatctctaagcactgaagctaaaaggaactaggtatctaatgatttttaaatttcttgasatacctatttctcyctctagaaaataaataatcactcctctyttcctagatgaaaacttctggatgatcagaggatatgctgtcttgccagattatcccaaatccatccatacattaggttttccaggacgtgtgaagaaaatagatgcagccgtctgtgataagaccacaagaaaaacctacttctttgtgggcatttggtgctggaggtaagtttacagacaattgacactttgttttattatggagaaaaatattcacaatagcatmactttgacacagacaaaattaaaatgaatccataatattttttatttttttattttttttgagatggagtcttgctctgtctcccaggctagagtgtagtgctgcaatctctgctcactgcagcctcgacctcctgctttcaagagatcctcctgtctcagcaacccccaagtaactgatactacagkcatgtgccaccacgcctggctaatttttgtactttttgtagagatggagtttcaccatgattctcagtctggtctcgaactcctgggctcaagcgatccacccacctcggcctctcaaagtrctgggattacaggcatgagtcgccacgcccagcccatagtcttcttaaagtgaataatgaaggcagtggatgacatttatcaagccgaaagagatctcaatgagtctaatgactttccttcaatttaaaaaaaaagataagataaartaaaaagttggtgatcccaaccaaattgccaatgacacaaacatatctagtgaaaaattttgaaagctccaagctcagccttcaatctgatgtaacgatttctctgaatagcatcaatctaacatatgttgtgccctttttccctgatcatttcttgtttggaagattctataaatgattcaaccaaacataatctttactgtatttttattattgatccaattagttttcctctactatgcctatgtattccccacatccctgcttgactctaagttgtgcggtagacaaattaagctccccaaaccaaagatccgctggtatcctttcatattcttgtatgcaggtttgatgaaatgacccaaaccatggacaaaggrttcccgcagagagtggtaaaacactttcctggaatcagtatccgtgttgatgctgctttccagtacaaaggtaagcatggatgtctcacttattgggatacttgagagactgtgttgactrtgaaaaaagacagcacaaaaacttaaatgcttttattttaatgyaattttgctaytcttaagtatatacaataataaacattaaccccacaaacattatcacaaactgaatccataaatcctgaattatactctctgttatactatctcaaatctatgtaaaaagtaccaaatccattttactcatcattgataagtaaagacaccccctaaagtgtgcgaagtgactaagcacatgaacaaaacaatgattctcaaactttaatgtatgtaccttaatgtacatagcttggggtttgtgtgtgaaacaaagtatttkaggcagaattgtgagtgatacctaagaatctgcagttttaaaagaacctcaggcaatgtaatgaatacaatccagcaactatatcatccaagacaatgacctagaccatggggtaatctagaaatatctttgagtgacatgatctattattacaatgaaatctaacacagaacctcaaaacctaaaacagatcaaagtagaacggctctaagaaaatgagaatatagagaccaaggccatatccacaggggccttttcctccccctcactgagacactttgttgaagcctagtttgaaaacctctggcatagaccacagtctggctagaaaggtaaaaagtcccttgaaactcaccctttataacactggcttcctccttagggaaataaaaataataggatttcccacatgacagtagaaaactaaaatgtatgtatgtgattccacaaatttcttcgttctccataatrytatttttttccatgtttataaaatttaaaagtatggaagtattatatagttatgaaagataactaatcctgattccctgtctctaggattcttctttttcagccgtggatcaaagcaatttgaatacracattaagacaaagaatattacccgaatcatgagaactaatacttggtttcaatgcaaagaaccaaagaactcctsatttggttttgatrtcaacaaggaaaaagcacattcaggaggcataaagatattgtatcataagagtttaagcttgtttatttttggtattgttcatttgctgaaaaacacttctatttatcaataaattcatagacctaaaataaacctcaacaggtcttttaatataaattctgcttcaaaatagaataaaaccattctttaacaacaagttgctggtcctagttctaaatatccaaattcaatggccattttgagctgcctgattcttttaataggaagttattatgtagaaacaaaaatctctgactgtactttaagcctatttcatgctttgtggacttggagaagacatgtcttataactgaatactgaaacatttattaaaccaatctttagcattctattttgtctggacctttggagtttaagagccccaataaactacagtgctcatccctatgcatgttctgaacccatcaatcaagtaagttactccacctcccaaagagaagggtgacagcctggatagatgcagggtgagttacgttagaggttattctctgacaagtaaggaactagcagaagtaggagagaagtgttcccccagcctcacaaacattgaccaacgccgttaaacattccttagggaatataaaattaagttttctgcacactgatttcagacacaagaaatgtgaggattttcatcctgtgtttgtggtatatgtgcatcatctgagcctatgggtagaaagtttctgtactctttgttccatcatggatttgttgactttctaaatgcttatggcttgattttatcattataccctcaaagttaagtgcttagcaaagctcttaacaaaatttttgacccagaaaatgggagattatcagtggaacttgcttctgatgaggtgatatattgggcattacgtcaactgatagaaaataggcatagaaaatcacacaaattcctacagttggtccccacccccacttccctggagttcagtgttcccagttgcctaaaagaagaggtgcataaaagagttattctatgtttgaaacacaaagtaaattttaagaagtacagcttaacactcagcaggtagtagttagtagtctttgtgaaaaaaatatatagtgctggaataatcaaatatccatatgcatgaaaaaagaatgttgacccctacctcacactattcacaaaaattaataaaaatgtgccatagacctctaaatataagaaataaaattataaaacttgcaaaaaatattttttaaaaaaattttgggactttggactaagcaaagatttcttaggtagaacataaaaactattaaccattaaaaaatgaatgaattaaactttaacatttaaaacctttgctttcaaaaaacaatattgaaagaataaaaagttggctgggcacagtggctcctgcctgtaatcccagcactttgggaggccaagacaggaagattgcgtgaggccagaagttcaagactagcccagccaacatagcaagaccctatttctatataaaacatataattaaataaaattttttttccaggcgtggtggctcacacctgtaatcccagcactttgggaagctgaggtgggcggatcatgaggtcaggagattgcgaccatcctggctaacatggtgaaaccctgtgtctactaaaaatacgaaaattaactgggcttggtggtgcgcgcctgcagtcccagtactcggggggctgaggcaggagaatcgcttgaaccagggaggtggaggttgcagtgagccaagatcgcgtaactgcattccagcctcatgacagagtgagactccatctcaaaaacaaaacaaaacaaaacaaaacaaaacaaaacaaaaaactgctgggctgggcgcagtggctcatgcctgtaatcctagcactttgggaagccaaggcaggtggatcacaaggtcaggagttcaagaccagcctggccaagatggtgaaaccctgtctctactaaaaatgcaaaaaataattagccaggtgtggtggcaggtgcctgtaatcccaactactcgggaggctgaggcaggagaatcgcttgaacccagggggcagaggttgcagtcagctgagatcacgccactgcactccagcctgggcaacagagtgagactccgcctcaaaaagaaaaataaaaatttaaaaggatgaaaagtccagctatacactggggaaaaaatattttcaaaacatatatctgataaaggacttgtatcttaaatatataaagaattcttataactcatagataagacaaacagctcattttttttttttttttttgagacagggtctcactctgttgccaaggctggaatgcagtggtgcagtctcagctcactgcaacatctgcctccgggtctccagcaattctcccacctcagcctcccaagtagctgggattacaggcacacaccaccatgccaggttagtttttgtattttttacagagatggcatttcaccgtgttgcccaggctgggaactcctgggctcaagtgatccgcccacctcagcctccaaagtgctggggttacaagcatgagccaccgcccctgccatcccctcatttttttaaaaaaattaatgaatgtttatattttaaattatttatttatttatttttagaaagagtcttattctgttacccaggctggaatgcagtggtgcgatcttggctcactgcaaccttcgcctcccaggttcaagagattctgccatctcagcctccccagtagctgggattataggcgcccaccaccgctcccagctaatttttgtatttttagtagagacggggtttcaccatgttggccaggctggtctcaaactcctgatctcaagtgatctgtctgccttggcctcccaaagtgctgggattacaggcatgagccaccgtgcccggccttatttatttattttgagacacagtctcactctgcctcccaggctggagtgcagtggtgccatctctgctcaccgcaacctccacctcccaggttcaagtgattcttgtgcctcagcctcttgagtagctggaattacaggtgtacaccaccacgcctaatttttgtattttcagtggagacgaggttttgccatgttggccaggctggtctcgaattcctgacctcaagtgatccactcatctaggcctcccaaagtgctgggactacaggcatgagccactgcacacaacctcagttttttttaatgcccaaaatattcaccatatgagtagtaaattagtacatgaaaagatttttcttttttttttttggagatggagtctctctccgttgcccaggctggaatgcagtggcgcgatctcagctcactgcaacctctgcctcctgggttcaagcaattctcctgtctcagcctcccgagtagctgagactacaggtgcacgccaccacacccagctaatttttgtatttttagtagagacggggtttcaccatgttggtcaagatggtctcgatctcttgacctcgtgatctgcccacctcggcctcccaaagtgcttggattacaggtgtgagccaccacacccagcaagatttttcaatatcattagtcattaggtaagtgctaaaccacaaggagatactactgaatacccagtaaaatggtgaacattcaatggagaaagaaacatgctctgataacatattcttaatgtttgctttcaaaggtgtgttgctgtgaaactctgccattcactgaaataaagagtttatgatgcattttaaaataaataaatacataaataagatggttaatatttaaaagctggccaggtgtggttgctcatgcctgtaatcccagcactttgggaggccgaggtgggtggattgcttgaggccaggagttggagaccaacctgagcaacatggtgaaaccccatgtctactaaaaccacaaaaaattagccaggcgtggtggcatgcacctgtaatcccagctacttggaaggctggggcagaagaatctcttgaacccgggaggtggatgttgcagtgagccgagatcatgccactggaatgttaacaagggaaagagagaaagaaagctctctgccacagaaagggttcccaaaaaagggtttccatttcacagttgaatacagagacttttataaggaaccactgagtgttgggtgtctcatttgcataaggagcaaatttctggtcgctccacccagtcctcctagtgtgcatgcaggcccttagcttgagttactccatattgtctttgtttcccttaccgtgcatgtgtcaggggatagcattttccattgcagataagtctgggtaagtctcctgtgtagactttcttatgtatgcagctgtgggcatatcttaggcaagcccccctgtgaaagttcccttatcagtgcttgcatgccgttcttttgtttgaaagaaatcaatggagcatccaccctaactgcctgcctgactggtttcttccttcctcactcagtttggcaatttattataaaattaaacccacacttctcctgtgacccaatgatcctactctaaatgtttacccaagaagaatgaaaacctgcccaaataagtatttgcacataaatgttcatgaaagttttatttatgatagctaaaatctagaaacaacccaaatatctatcagttgatgaatagacaaactggaatgtccatactcaacaacaaaaaggaagaaatgactgacacatgaaacaatatggatgaatcccaaaagcaatatggaaagtgaatgaaaccagatacaaaagacttcatgatatatgattccatttatatgaaaaattagaggagacaaaactatagtaacagaaagcaggtcactgattgccaaaggtgggaagtgggaggagggattgactacaaaggatcatgagtaaactttctggggtgatagaaatgttctatatcatgattgttgcagtggtgacactagtgtatatatatataggctgtgcaaataaaattagtgaattgtatatgtttactctacttcgataaagtggattttaaaaagtagtatgacttactacttaacatgtagtagattctcaaatgttggtcaagtttgttttctttccttgtccctattcttgttctgtagcacaaatacgtgtgatattacagttaggagagcaccagaaattgcactcatttttgcttatgggcagttactttttcctggatatatattcttaaaaattgacctgtaggagaggacaagattcaactataaaaataatyctatttcaaattcagtggaaaatctaaaaacacagttttcaaagcatatatgttgaatattagaattatattaaagatttataactcaaaaagtaggtgatatcactcatcctttaagatttaaataaacttgatttccaaaatccaaaatcttatggagtttctaatgctccccatcaaacaattagagggaaaaatcttattaatatcctttggcaaacccacctccaaaatcgtctccccacagtgacctccccacagatgccaaccttctgctcttctgtctgacccctcccttctttgacctctgggaggaacccaagttcctgtttctttatctttctttttaaatgtaaactagttatgtaaacctgtttattgtctcatttaaacatgtcattatggcctcccattccttggaaaaacagcttatcaaggtatcttttctcctagaaaagagctttaaaataagatattttgatttccatctgctagcttggaggctgggtaagagtatgagctttcaacccagattagttaggctcattgagcacttcctctatttattcaccatggaacctggggaaagttccttctctgtgctacaatttctccatttgttaaatgaggatgctaacagatccaagctgtagcctgaacaattggcaactggtcacatgcgtcacttacaataagtacttgatgtagttaatgcgcagtaaatgtgagccatcattattataattagatatgctaagcaatttattctaaagtaaaaacaattgggaaaactaaaaattaagctcagagtttctcaaaattggaaaaaaatatgggccaattctttctgtcctatatcatacacttacagaaacagactagctggaacaacaaacataattgacacttggcttgtcccttctggttttcttaagggcctgcgattacgtctcaaaagaaagaaacagctttaaaaacaagcatgaacaagacagtgctggcaatagttattcattttggagatttgaacagctgaggtggaaaagaaatgaattcacacag

SEQ ID NO: 8704 - DNA, 28037 bp, Homo sapiens
aacgagacaaacaggtcctccttaggtgtaagttcatggccttggccccacccctgaaactcagccatctgagacagttttaggcctgaggcaaccccagactttgggttgttgtttgctgggcacagcctccttttgccaatgttgcaatcctttgtaagagaccacaggttgatcacccgttcctgttactgagcacagagaggtttgtaggccagtctctccaggaattctgacgcactgcaaaatcccatggtctgaatgcttctaccttccctgtgaaagcccctggcctcagaaaaggaagctggtttaagtgaccaacatttggggtggagcttccgagggcccagccaccgtgttacatgcaacaatcaacagagatattctttggctagagttgtttttctgggtataggaccctataattaaaatcagctctccaacttcccttcctccaaaaagtatacaatgtaaggaggaaaatgcaaattgaaaagttgctagcccttcccgccagaatgccaccccaagcctcccctgcaggaagttctggagtccccaactctgccccaagcctgaggcccttgataaggtaaagggatgtgagtgtggaggccggagcccccctcgccctgtaggctgctccccttgcttttccctttgaatgttacagtttagttctgtgacttacttataattgcctgaattccccgcccacgctttctcttactttggggcttctcaccgttcctcttcctccatcttcctcctctgaccccactcccaagcctgaatggggtgttcctcttccgtgctcccacaaaaccctgtgcctctttcatcgttgcatatattatgctgtaatgtagttttctggaggtgtgaagactatgaatcctatgaagacaaatacacacctaccttgctgaccgttgtatcctcagaatctaatactgcacttggcacacagtggttgggagtaaatattcatgaggcaaacacacaggaaggactcttttgttatggttgtttgttgttgttgcaagtaacataaccccaccttgatctagctgactgacggctctaccaccttgtcttttgcagcacaagaggaataggaactgcacctcttccttcagtttcagcttgaataatatcaggaagattcgtatcggtctgagttgggtcacgtacccgacgtgctatagctgaggatggggtaagctgattggagtttgcaacactgttcacatagccaagatatggaaagaacctaaatgtcaactggtggatgaatggataaagaaattgtggtatatacatacactggaatattattcaaccttaaaaagaaggaaatcctaacatttgtgacaacatggatggacctggagggaattatgctgagtgaaataagacagacacaaaaagacatttcttgcaggagctcacttatatgtggaatctaaaatagtcaagcttaaagaagagagtagactactggttgtcaggagcaggagaaaagtggaaatgaagaggtgatagttaaagggtacaaagtttcagttatacaagataaataagttctggaggtttactattaatatatcacatagtacctataagtaacaatactgtattgtatacttaaaattgctaagagggtatatcttatatgttcttaccaataataataataatggtaataattaaggggcaggaggacacttcaaaaggtgatggatatgttwwtggccttgatggtggtgatggtttcatgagagtatacttatccccaaactaattgagatgtaaatattaaatatgtacagctttttgtatgtcaatcgtacctcagtaaagtagtttaaaaatggttggactgagaaaaggaggagctgctcagcaacatgaggctgggtgctgggcagacaaaacctcacacatgcattactgaacccacggactcatgtctgtgagctttgtggctgtggatgcaccatgccaatgtagtcaaggattcttcaatgtgtaccttactggattagttccctctgtttatttgtattgactcctcagttcccttatgggttgcttgttggctcttgtggaattatttaagtaaggctttggttgcaggagtcagacatgcttaagctggttttggctgtaatggggaatttgtgagatgtgacacagtgacaggaagtgcagccagacgttgtgagaggcagtaactgggaataggaaagttatgagaagttaaggcagtagtaattgtttctctatcgaaggccataatgttatcattcctgcctctatctgtttgcttgttcttctctctcagcagaatggtcttctctgcttctctgtgcacctgcagaaggtgaccaccctaaggcttatggattcaggagtcctcagtttgagagcagttaccaaatgcctcgcccctgtgaactctagtcccagtttcttattcctggtactggcttagtttgaggcagctgcccaccgtaagtccagtgagccatggcctggggacaaggtcaggtacatgtgtaatcagctgggtctgtgagttgtggtggtggcgatggaggtagctcccagaaaaatggattacaggttaagaagagtctatatatcttgaccacatttgatgtgacttggaagtttcaatgtgtgaccacttacaaagttatgatcaggtgtctcatttatttatggtgatgtatgagtccgtgtgtgagtgtgtgtgtgtctgtgtttgtgtgtgtgtgtgagagagagagagagaatgagaatatgagtggtggtttcccatttatttttctatgggccaaatcctgggctatgagctggagatataagagtaaacaaaatagacacggtgcttgctgtgacctgccctgggagacagatattacacggaggatcacataaatgcagagtctgagctgaggtcttaagggtgaggataagtaactagtcagtggagcaggggagggaagggtgttccatgcctgtgtcaaggtcctgaggtgagagaaagaggtgaatttgaggaaccaaaaggagttcagggaacaagaggggctgtttcacaagctgagtctggaagctgagcaggctgagcagattcttaggaactctgcaaaaacttaagggcttgtctatgaccgtaaacaactacggtcgtagataaacaagttggcaaacaactcaaggatttacagtcatcagaattgtaaaactgatcccatgtattttcaaacctcaaatcccttgctctgaccttgtgtgtctaagctagaaggaagcaggatssacctctcccctggctggaatgaagggattcacccaagctctcagtcttctcacggcatccagggcccccctgcttgtgtgtggtctagatttccattcccatagtaggaattcctttgggagccttggggtctctcctgctagagggcttcacctgtgactgtctcaattcaagggaggggttctaataacattaaacctcaatatcttgctcctccattcctgatgcctccctttccttctacccttcccctacctccttctttcctatgccacaggctggcaggttagtgccagagcaagtggccagtcaccatcattggggttgtggatcctcagggttcttcagaagccccttcaccatgatcaagagtctccagtcactcagaattccacggttcccaaatgccagctctcccactactcccagcgttctccatctctgggatgttgggctccaggcttctcagatgcactgagtaccctaggctaagccactgatccatcagaacttcatagcctgagaggagagggagacaggcttgcaaaggagagttctgactagacactggggtgctacagatgcccgtaagttgtccctttaccctcgatgtccccagtgttgggaccacctgggaatgcccagccttgtgtgctgattgacttgtagtcccctggccctgactggaagcctagttttctctctcatgaccagctaggcccctagctccccagggaagaaatccaatctatttcctctgatagtaatggctaatacttaaataatgccaaccacatgccaagcactttacagttgttagcccagtcttcacaagcaccttgtgaggtgggcaagagtcttatcttactctcattttatagatgtggcccaggatcccacagctatagttcatggtgctgggatttgaacctctggccaccagagcccaccttaatgtgtcctcctcctgttgtcataacagaaaagtacaacaccatgatgacacatcaggctatcctggcaggttcccaggctgccccaatgcccaactttctaggtttacaaagttgacatttacgaagtttccaggtttacaaatctagtttctgattctttagtcagcaggaatttctctacaaaagctgcttcgaaaatttccagccaaaccttacayaccttggcattacatcttggtgagccaaggyggaagagaacaggaagtgaaggccccatgggaagtccctgcggtcgggagcacccaggcggggcggggggtggggggctttcctgtggccggctccctgcccctcccacccccattcaggccctgtgagttgaatgaagagaccctgggaatgagtccaggtctgcagggttagaggaaattgaaggcccttaccagatccctgttgagaagtttatgaattatgagcccttctgcaaatgagagggttcttccctgtcaggagggacagattgtaggtggcaagattggtggcagccagtaggctggtctgctccttcctctctatttcatatgtgtatgaaggcattacctgcagcaagggcctgtgtaaatgcatgtgatttacagagcattttatgtactgcgtgtcattcatgcttccggtgagccctaagtctaagatagggcagatagcatcaggtccattttgcagctgtcaaaatgaggtctgaagggcagaagtggtgtgcccacacacacacaactggttggctgcagacctggggactagacccgggacttcgtcctgcccaggggtctcttgccactgctccccatcaacttggatggctttaagcatttgtgagttgtctgctccctgatggcagaatgcagagacatgaagctacaagcaggttcgctcccaacggcaaaaaggaggaggggtgttcagaacatcaggtgcttctagagaaagcagggagagagtatctggccttgtggacaatgtcacggcagaggccaggtatagggcatgggggtaactggaagcgggatggaccctgttattccctaagacatggcttccacgtagtgctcaaacaaggcctttgcccttgctgttccctccacctggaatattcttccccttccttgacattgctcaggtctccactcttatgtcaccctctcagagagggcttccctggccactttccctaaaatagccacccactcctaggtccctcaaaagcatatcctgctttggattttccctatagcaatatgccctatgaagttattttatttgttaacttgtttcttgtctgttttcctttgttagagcgttggggaccttgtctggcttgttcccaatgcctggaagagtgcctggcacacaggattaagccaacacatatgttttgaatgaatgtgtgcacacatgcatgagctggcggcagtcggggttggggtaagcacgaaggcccagctcagttctctgcatgtgacctcccatcttacgcagataagaaccagtttggtttctgctagcctgagtcaccctcctggaaactgggcctgcttggcatcaagtcagccatcagccggcccatctcctcatgctggccaaccctctgtgagtgtgtgggaggggaggctgggctcctccttgtactctctgaggtgctctggaaggaggggcagctccaccctgggagggactgtggcccaggtactrcccgggtgctactttatgggcagcagctcagttgagttagagtctggaagacctcrgaagacctcctgtcctatsaggccctccccatggctttaggtaagctccttccactctcatttttycacctgagaaatgagagaggaaaatgtctacaattggtgtttatcaaatgctttcaggctctggtgagcaagcgtccaggaaaatgtcaagcgcatggagctccaggcctgtctgggggatctgggcacggggaggcatccatgggagaccatgcaggcactctgaggcaggggctgcaagcctagtgcctgctggggcagcaggtgaacagagaggtgtaactgctgtgacagaagtcatggagtccttggagtgtgagrgtcattttccactgttgatagaatagggaaattggtgaaatagccctgttaaatgagagaaagaacagtgtgagctcaatgagaaatactaatagaatgtggcactgagccacaaggtctgagggttgattgataaggaagggtggggactgtggagaattaagggcttggcacwggtcagttccascagttgtcacaagagaatgcaggctcaggtggccagaacttctcgcttttccagaagagtccgatattctgatttcattatrtatagtattctgattaaacmagacaataaagcaagcagataaaatatttaaaktataagctgccagtttgcaacctccggttaggatttgtgtggggcaaagaaaaaaactctcaggatcattggtatgtagactctaattttaagtttctaatttaaaattggcccctgaggctgggcgtggtggctcacacctgtaatcccagcattttgggaggccaaggtgggtggatctcttgaggtcaagagttcaaggcctgcctggycaacatggtgaaaccctgtctctattaaaaatacaaaaattagctgggcatggtggtgcatgyctgcaatctyagctacttgggtagctaaggcaggagaattgctggaacccrggaggtagaggttgcagtgaatggagatcacaccactgcactccagtctgggcaatagagagagacgctctctctaaaaaaaaatatgtaaagataaataaaatgaaataaaataggcctctaatgagcaggccattctcctttctgggtcttactttccttrcactcctttctgggtgttaagaggaggtctagaggaagctggacaactcttagcttgtagtaagcacagtggaagtrtcagctcttaatgggtcatggacacgttacaagctaggmgcckygctgagcactttacatggtttatcccactgaaccctctcaataaccctatgaggaagggctattattgctcacattttcagaagaggaaatggatatagagagattagataatttgcccatggccagacagctagtataagaggaggaggtggattgactgcagacattctgtcttcaaaccactacactatgctrtggrggcacagagacttaatgaaatcatggagaggggaattgctttgtcaaccacaagcagttattccgggggcagcagatcctcccctgtcccccagtgggtacaatggtccctggtgggttgtgctacaatgttagcccatggtcttatgtgtttttcaaatgtgtaaagtaggatgctggaaccactcttagaaccagataccratacattgtgaagaaataaatctctgtgcttaaaactggttcatcccaaaatattttgaactgacacacaataggtgctaaataaatgtgtgttaacttgaattggattgaattcgggaaaaaagtgcaataagcttagtgaagacaccatgttccctgggtagaggaaccacattctccatctaakgccaggagtatgggaggtatcaatgtttgcccagcacagaacagggtgccaagaagagaaaagttgacggggtgcatactckgactggaaactggaagggtgagaacagagggtaaaggatagasatggaaccatgtgcatacactttgtgttaccttggacaagtcattcatttctctggacctctgctttctctctacacaatggggtcccaccacttcccttacagctgacttgtatgaagaaggaggtggaggaggaggagaaggtgaagacaatgctgactcaaagggtaaattmtttttaggatccaagtttgaaaacaattttaggctactagatatgaacaacatcttgattatgtagttgaaggaaattaaagatgaatggtttaattaaaaattaatcagaatgaaaacgattgattactaatatatctgcaatggtttattttcctgagtggcagactcactaaggtttttgaatactcctgtgtgattgctctatgtatgtatgtatgtatgtatgtatgcatgtatctatctatctgttgtctaataaaatggatcacatctctgctaataaaaacactacactggcagggtacaattataatcattaactgtgcctggaatttgcagcagcagccaccagaggtaccagtgccctttaagggttcataatttagaataatccaattatctgagtttttcagggactgaggggtttggcaaggtgtagaactttcagtaataaagtcaagaaagtcctggacaaaccaaggtagttggtcactctagtccataaccaggtaaagagctttccctgtaacctgtgtaaggttttagaatcatttctttccttattaccaaaaatcctccccaaattttcaagaaattatgaactaaatagttactctatgagataggagttcagcccaaaagaaacaccataagaacaaatataattcttgcttatgttaaccatgcaatgaagcagagagaaaaagtcagtggcctctttaggaggactgtagtgtgggaagaaataactaaactgggtttcaatcctggcctggccaggatctggagcaagtgagttaatctttctaagccttgagtagtttcttcttcttcttcttcttcttcctcccccttctcctcttcttcttcctcctccttctcctcttcttcttcttcttcttcttcttcctcttcttcttcttcctcctcctcctcctcytcttcttcttcytcttcctcttcctcttcctcttcttcctcttcctcttattcttctrcgtcgtcttcgtcttctttttattttcaaagtgaaagcaagtttattaagaaagtaaaggaataaaagaatggccactccatagacagagtagcctgaaccttgagttcttctataaagtcactatgaatttatactcattttgaaagtgggtgtcaatatgtctgtccactttgcacagctgttatgtggacaaaaggagatctgtgtgaaagtgtaacacagagcctaaactataacaggtaagcaacacagttgtccccttccccatggtgtctgttcttctccatttcctcctgtctgcagggggattataaaactaatcatcaaagccaagaaggcaagagcaagcatgtaccgctgaaaacacaagataactgcataagtaatgactttcagtgcagattcatagctaacccataaactgctggggcaaaaatcatcttggaaggctctgaacctcaraaaggattcacagtaagttaaccatgtagatctgagaggagagtagcttcttgtagataacagttggattatataccatgtcctgatccccttcatcatccaggagagcagagrtggtcaccctgatagcagcaagcctgggggctgcagcttggtgggtagaggtactcaggggtacagatgtctccaaacctgtcctgctgccttagggagcttctaataagttgatggatttggttaaaattaacttggctacttggcaggactgggtcagtgaggaccaacaaaaagaagacatcagattataccctgggggtttgtatttcttgtgtttctttctcttctttgtactaaaatatttacccatgactgggaaagagcaactggagtctttgtagcattatcttagcaaaaatttacaaagtttggaaaacaatattgcccatattgtgtggtgtgtcctgtgacactcaggattcaagtgttggccgaagccactaaatgtgagatgaagccattacaaggcagtgtgcacatctgtccacccaarctggatgccaacatttcacaaatagtgcttgcgtgacacaaatgcagttccaggaggcccaaatgaaaatgtttgtactgaaatttgttaaagcttcccgacaaactagatttatcagtaaggattgttttctgcaagggggatgaaacttgtggggtgagccatttgggctgaggaggagggaggttggagctgagaaatgtggagacaatttccctttagaaggactgaatctccctgcctctctggggtgcggcagccagcaggatccaatggtgtatatgtctccccagctccccattcagtgatatcatgtcagtagcttgaaattatccgtggtgggagtattatgtcatggaaattggcaaatggaaacttttattggagattcaattgttaaacttttaccagcacaacactgccctgccttcagagtcaatgaccctatccaagtttaatccatctgtccactgtctccaacacgatctttataaaacwcwcctgacaacattacccttttattcagttttttaaaagataagtttccagctcatcgggstggctttaaaggccatttctcctctggacctcacccaacttttcaaatcacttttcctacccctacctctaaatgctactcaaactccagccatcctgaataataagacttttgaaaagtagattatgggctgggcacagtggctcacacctgtaatcccagcactttgggaggccaagatgggtggatcacctgaggtcrggagttcgagaccagcctgactaacatagtgaaaccctgtctctactaaaaatacaaaattagttgggggtggtggcacaagcctgtaatcccagctactcaggaggttgaggcaggggaattgcttgaacctgggaggcggaggttgcggtgagcctagattgctccactgcactccagcctgggcaacaagagcgaaactccatctcaaaaaaataaataaataaataaagtagattacatcagatacctctggcctaggttgtttatgaccaactctcctgctgagaataactagaaaagctagacaaaacatatttccaaaagatctctttggaggcatcagagaatggccaaggctgtaaggaactgcctgagcccagagaggtggagcccagcactggtgccctttactcctggggacatgtgctggtttcaaaaacttcagctgagyttttgagcattcatggaacttggtgggggagatgaaatttgtaccttaaatcctgcctacagggagggtccctgataatccccacccaatttggaaatctgggtcagccttcacaggtactgaagccctcctctgaatgatctcaagtcctgctagggtagaggttacctgcttttgaaaggctcctggcctacctgtgcagcaggagcaaaagtgaaccatctcagggtacagataacaatcatccagagccttgaatgacctctactgtgcttaatatatagtattcagcagtcagtaaaaaggatttaggcacatgcaagatgacctgtgtatcagggagaaataggcaataaattgagatccagcagggatttgaatcatggatttgaatcaggggcagccttcgaaagaactrtggagaatatactcagatttaaaacataagattggaatttttggcagagaactaacaactgtacaaaaaaggaaccaaatggaaatcctagaactgaaagatgcaattaaccgatgttgagaaatagccaacatctattgaacacttcccatgtggacagctgtgctaaacactttacaggcatcaacataagatgtgtccccttacagcagtgcagtgtccctcctaagacatggacagcctggtttccctatctctctgcttcatcaaaacccctttacgtggggcttagacactcctgttgtctctagtgtctagtagcacagggctcagcacatggaagccactagatacaatttgatgaccaggacctccgatgaaagccatgggtgctgattgggaaggcattgtcttttatgtgctatggtcttaaagcttcatccaggaagcagaactcggggggtgctgaggacccagaaccgagaataagattagtcagagatttcctgtgggcagaaatcataaggacgccaactgtttgggtgagataagacgaaaccaagagtggacttgtggccagaagcgtgaggaagaggragagagcttcccttgtcccctttcttcctctccctaagccacagtgattgacagcccccccsctttggagtcagagcaggcttgagactggactgggaaaggagggtgggtcaggatacagagcaggaaggctgggagtgcagggcaggagcaaggggctggggcattcattgtgcctgatctctcccactttacctggggtaaagaagcatatgcaaaagccacggtgtgagtatttcccaagtgccagggtcagggcatgattcatcacgtgcagcatttcattcaatccttatagtaaccgatgatgtggcttctattattagctctatcagataatgaaactgagaccaagacaggctctgcacattgtgtggggtaatgacacagggggattcagacctagactccataactcctgccccagggaccacccccaccctcaccctgtgcatgtcgacaaaggacagactgggccacttctcaggacacagcggggaaatgacacagagcagggaggttccaggagccccgagcgtcttttctccaggagaatactctctgaattcagactggggtcagagaaacatttacccaggagccgcagtgtgggyggggctttttacttgaaacgctgtctgaaggcagtggccaggatggaactctccaccctaccttggcaagccacttctcttctgcaatctgtaaggacattgttgagagaattatggtcttccaattccggagggttgaagaaagacaaataggagagaacctatcatagtcaggtgctagctgccttctctttcagagagtgtgagaataaagtgatacacttgattattagcaaatactttggaaattttaaacgctaatattcaacacactctggaagaggcaaataagtagacaggttcatatacatcatctccttcagctagtcctcacaaaaacaaacaaatgaataaacaaaattcttctttggccctcataggaagacactgtttcttgaacgtgtttcaaaaaggatgggtgactcactcaaggtcacactgtttatgaggacagtacaggaatacagacatgccattttgcctgaaaaaatccatcacccagggaggtgacacaattttgcagaaatgttctatttcctctgaaggatacattctttaaacctttgggaaattcattcatagtcttcctcctttgaaggattaactctctggacacaaagtgtttgattctgatttgttggttggaagatgtgttggttgagagaaagattctgatttgttggttgaaaatagactcatcaagatcaactgctgtagtagtaaatattttgacattttgtctgtattcctgtgctgccctcacaagctgcatcaccttgagtgagtcattcatacttttttgtttgtttttgttttggagatggagtcttactctgttgcctaggctggagtgcggtggcgtgatcttggctcactgcgacctccatctcctgggttcaagtgatcctcctgcctcagcctcccgagtagctgggattacaggcacatgccaccatccctgctaatttttgcattttcagtagagacggagtttcaccatgttggtcaggttggtcttgaactcctgacctcaggtgatccgcccacctcagcctccccaagtgctgggattacaggtgtgagccaccgtgcccagcccagccatcrtttttgaaacacgtttgagaaayagtgtcttcctttgagggccaaggagacattttttttgtttatttgtttgtttttgtgaggactagctgaagggggtgatgtatattaacctgcctacttatttgcctcttcccagagtgtgatgaatattagggtttaaagtttctgaagcatttgttaataaagcccggggctggaggtcagaagacctggatttctctgcatacttttgccatcagcaagctgtgtgaccttggacagatcccttttttgtctaaatctttctgagtcttcttgaaaacaatgccaggttgggacaggatgattgccaagctcccgtccagctctaaaacactgcaacgtatgcttctgcaccagcactgtccatcctgtagatcatgcagaaattctcttcaactttttcctacccataaaataggagcatgcttacctttttcctaatgttccaggccccgggtctagaatattgtaagtaaggaagttaatgygtatcasagcccattatgggccagaagttctcctcttccttcctacacctgcttcctccctccctccctccctctttcccttccttccttccatccatttgtgaagaagacatgatcaccctcattctgagagtgaagagacagaggctcaactaatgaaatgatttgttcaaggtcacacgggtggcacaaggcaagtggcagargttgaatttagacccattcctgtccaaatgctgagtttatgtcatcgtcccgagaccataactttaaagatgtaagatagtgggaaaagagttgatttcaaagcacctctcagaaggactcactttacatcaggggtcagcagactcaggccaaatccggtccattccccgcttttgcaaagaaagttgtagtggaacacagctaggcttattgatttatggattgccaacgtccttttgtgaaacagacagctgagctgagtaatcgtggygcacaaaacctaaaatatttactatctcgtcctttacagaatgtttgccaatctatggtccggagtccaaggctgtccatttttcaaagaacacaaagtgacatgagactgtcccatgtgcagggagccctatcattttattatgaaaaaacggcctttctgctcaaatctgttttttaaaaagtcaacaaasagactctgggtacctgtcaggaacagtagggagtttggtttccattgtgctcttcttcccaggaactcaatgaaggggaaatagaaatcttaattttggggaaattgcacaggggaaaaaggggagggaatcagttacaacactccattgcgacacttagtggggttgaaagtgacaacagcaagggtttctctttttggaaatgcgaggagggtatttccgcttctygcagtggggyagggtggcagacgcctagcttgggtgagtgactatttctttataaaccacaactctgggcccgcaatggcagtccactgccttgctgcagtcacagaatggaaatctgcagaggcctccgcagtcacctaatcactctcctcctcttcctgttccattcagagacratctgccgaccctctgggagaaaatccagcaagatgcaagccttcaggtaargctaccccaaggaggagaaggtgagggtggatcagctggagactggaaacatatcacagctgccaggggctgccagsccccagagggcctgagaactgggtttgggctggagaggatgtccattattcaagaaagaggctgttacatgcatgggcttcaggacttgtgtttcaaaatatcccagatgtggatagtgcgaccggagggctgtcttactttcccagagactcaggaacccagtgagtaatagatgcatgccaaggagtgggactgcgattcaggcctagttgaatgtgctgacagagaagcagagaggggcaccrggggcacagcccgaaggcccagactgatatgggcaaggcctgtctgtgctgacatgtcggagggtcccactctccagggaccttggtttccccgtctgtgacatctgtgacatgagagtcacgataactccttgtgtgccttacagggttgttgtgaaaattaaatgcacagataatagcrtaacagtattccgtgcattgtaaagagcctgaaaaccattatgatttgaaaatggaatcrgctttgtgagaccatcactattgtaaagatgtgatgctgatagaaatgacaggactgcttgtgcatgccctctgcagtgtgacattccagcagtgaaatcatgttggggtgacttctcccccactctgacctttatgtttgtctgggccgaggctgcaagtcrggctctgtgggtgtatgagtgacaagtctctcccttccagatatggggactgtctgcttccctaggttgcctctccctgctctgatcagctakaagctccaggagatcctcctggaggccccagcaggtgatgtttatccctccagactgaggctaaatctagaaactaggataatcacaaacaggccaatgctgccatatgcaaagcactttggtttgcctggccacccctcgtcgagcatgtgggctcttcagagccacctgatgaggtgggtacagttagccacacttcacaggtgargaggtgaggcacaggtcccaggtcaggctggccrgagctctgtttattacgtctcacagctttgagtcctgctctcaaccagagaggccctttaccaagaagaaaggattgggacccagaatcaggtcactggctgaggtagagaggaagccrggttgttcccaagggtagctgctcctgcaggactctgagcaggtcaccagctaatggaggaaaggctctagggaaagacccttctggtctcagactcagagcgagttagctgcaaggtgttccgtctcttgaaacttctacctaggtgctatggtagccactagtctcaggtggctatttaaatttatacttaaatgaatgaaaatagaagaaaatttaaaatccagacccttggtcacactatccacatttaaagaggtcaatagccacaygtggttagtggccaccctattgggcagtgcagctacagaacatttttgcatcccagaaagttcttttggatgttgctgctctacagcatgctttgctgaaacagaagtgccttccctgggaatctcagatgggaagcaagtaaggaggggagtcaaatgtgggctcactgctcaccagctgtgagggttgggcctgcctcttaaccattgtcagcctcagtcttctcatccatgcatgccgtgggtatactaaaatactatacccctggaagagctggatgcaaatttgacaagttctgggggacacaggaaggtgccaagcacaaggctgggcacatggtggctgtgcactacagctgagtccttttccttttcagaatctgggatgttaaccagaagaccttctatctgaggaacaaccaactagttgcyggatacttgcaaggaccaaatgtcaatttagaaggtgagtggttgccaggaaagycaatgtatstrggcatcacgtcactttgcccstctgtctgcagcagcatggcctgcctgcacaaaccctaggkgcmatgtcctaatccttgttgggtctttgtattcaagtttgaagctgggagggcctggctactraagggcacatatgagggyagcctgaagagggtgtggagaggtagagtctaggtcagagktcagtgcctataggcacagtggtcycagggccacagctgggaagggcaaataccagaaggcaaggttgaccattcccttcctcaagtgcctattaaggctccatgttcctatgttgttcaaaccctaactcaatcccaaattaatccaccatgtataaggttgagctatgtctcttattcctggacaccatactcagccatattctggtccacrcattaaacaagctggatgaccttgaagaagcttcacccactctgttcctcagctttcccttcagtgggatgatatcaactggacaacaggatgtgcgattcttttagttccagccttccaggatgttttcrctcccctgtttgttgttgtaggatggtattacctccaccttcccaccttccctatgccctggttctgtctcctgtgcctcgctctgaaagtggatgagacctacaattcctgtcctggtagttctcctaatgaacacactgaagcacgaggaagctgagatttttgttgctacatgagagcatggaggcctcttagggagagaggaggttcagagactcctaggctcctgtggagccccactcatggccttgttcattttccctgcccctcagcaacactcctattgacctggagcacaggtatcctggggaaagtgagggaaatatggamatcacatggaacaacatccaggagactcaggcctctaggagtaactgggtagtgtgcatcctggggaaagtgagggaaatatggamatcacatggaacaacatccaggagactcaggcctctaggagtaactgggtagtgtgcatcctggggaaagtgagggaaatatggacatcacatggaacaacatccaggagactcaggcctctaggagtaactgggtagtgtgcttggtttaatcttctrtttasctgcagaccaggaagatgagacctctctgcccttctgacctcgggattttagttttgtggggaccaggggagatagaaaaatacccrgggtctcttcattattgctgcytcctcttctattaacctgaccctcccctctgttcttccccagaaaagatagatgtggtacccattgagcctcatgctctgttcttgggaatccatggagggaagatgtgcctgtcctgtgtcaagtctggtgatgagaccagactccagctggaggtaaaaacatgctttggatctcaaatcaccccaaaacccagtggcttgaaacaaccaawattttttcttatgattctgtgggttgaccaggattagctgggtagttctgttccatgtggtggaacatgctggggtcactttggaagctgcattcagcagagtgccwggcttgcgcygggcatccaaggtggtccctcatcctccaggctctctttccatgtgatctctcagtgtttaagagttagttggagcttccttacagcatggcggckgacttccaaaagggattattccaaaaagagcctcaacatgcaggcgcttattatracttctgcttgcatcatcctattggccaaagccagtcaygtggctaagtctagccccytgtgagaggagactrcataagagtgtgaacaccaggagacacggtcactgggggccaccactgtaaccatctaccacaggacctgaatctctgtgtgctactcccttgctcaagggcccccctacccacgcagacctgctgtcttctagcaaagcccatcctcaggacctttctcttccaatccttattgactcaaattgattagttggtgctccacccagagccctgtgctcctttatctcatgtaatgttaatgggtttcccagccctgggaaaacatggctttgtctcaggggcttgctggatgcaascttaacctcaatgtgagtggccatactgtggcactgtcmcatccctcaccagggacactgttctggagggtgactgcctgttctgtgaggagtggggatggctaggacatkgcatggaacacaccaccaccccatcttctcagagctcaaaccctgacagaacaccagctccaraggccttggcttctgctgatggtgccrtgtatttaccagacttagtggtccaaggccagagtggccagatttcccaaagtcaaggtgtgacagtgggacagcctctttgtgtctttgctgtcctaagaaacctgggccaggccaggcgcagtggctcacgcctgtaatcccagcactttgagargccaaggtgggcagatcacgaggtcaggagtttgagaccagcctggccaacatggtgaaaccctgtctctattaaaaatagaaaacattagacaggtgtggtggtgcatgcctgtaatcccagctactcaggaggctgaggcaggagaatcgcttgaacccaggaggtggaggttgcagtgagccgagattgtgccactgcactccagcctaggygacagagcaagactccgtctcgggaaaattaattaataaataaataaacctaggtcccagagtcccacagaatggcagacaggagcacctgggggcttttagggtatggcatttcccctgtactaactctgggctgtccagagggccatttcatggcgtggagtggagagggaggcagcacaggacttcctaggcctcagctctcacctgcccatcttttgatttccaggcagttaacatcactgacctgagcgagaacagaaagcaggacaagcgcttcgccttcatccgctcagacagyggccccaccaccagttttgagtctgccgcctgccccggttggttcctctgcacagcgatggaagctgaycagccygtcagcctcaccaatatgcctgacgaaggcgtcatggtcaccaaattctacttccaggaggacgagtagtactgcccaggcctgcctgttcccattcttgcatggcaaggactgcagggactgccagtccccctgccccagggctcccggctatgggggcactgaggaccagccattgaggggtggaccctcagaaggcgtcacaasaacctggtcacaggactctgcctyctcttcaactgaccagcctccatgctgcctccagaatggtctttctaatgtgtgaatcagagcacagcagcccctgcacaaagcccttccatgtcgcctctgcattcaggatcaaaccccgaccacctgcccaacctgctctcctcttgccactgcctcttcctccctcattccaccttcccatgccctggatccatcaggccacttgatgacccccaaccaagtggctcccacaccctgttttacaaaaaagaaaagaccagtccatgagggaggtttttaagggtttgtggaaaatgaaaattaggatttcatgatttttttttttcagtccccgtgaaggagagcccttcatttggagattatgttctttcggggagaggctgaggacttaaaatattcctgcatttgtgaaatgatggtgaaagtaagtggtagcttttcccttctttttcttctttttttgtgatgtcccaacttgtaaaaattaaaagttatggtactatgttagccccataattttttttttccttttaaaacacttccataatctggactcctctgtccaggcactgctgcccagcctccaagctccatctccactccagattttttacagctgcctgcagtactttacctcctatcagaagtttctcagctcccaaggctctgagcaaatgtggctcctgggggttctttcttcctctgctgaaggaataaattgctccttgacattgtagagcttctggcacttggagacttgtatgaaagatggctgtgcctctgcctgtctcccccaccrggctgggagctctgcagagcaggaaacatgactcgtatatgtctcaggtccctgcagggccaagcacctagcctcgctcttggcaggtactcagcgaatgaatgctgtatatgttgggtgcaaagttccctacttcctgtgacttcagctctgttttacaataaaatcttgaaaatgcctatattgttgactatgtccttggccttgacaggctttgggtatagagtgctgaggaaactgaaagaccaatgtgtctttcttaccccagaggctggcgcctggcctcttctctgagagttcttttcttccttcagcctcactctccctggataacatgagagcaaatctctctgcaaaaaagatatggggcagcactgtccacaacagcctctactggaaacaacccaagcacccatcacagaatgaattmgtacatcatgtatctgcacacaacacartgctccttggcaaagaaaatgaatgaattacagccagctgcacctcacaagacagataatcttacaaacatcatgtgggtacaagaatcacaaaagcatgcatagagtgtgattccatttctacaaagttcaaaacgggcaacatggggctgttgtgtggagggctgtggaaacaggtggtgcagagagaagcaaggccatgctctgtctgaaggcccagtgacacttggcccctgcgagagagagtggcaggcaggagcacctgggggattttagggtccagacaacattctatttcttggcatggatgcagttaggcggttttctgtatgtatattttatttcacaatacctagaaaataaaaagacttgccccccaacaaccagggtgtaaagaaaggagcatctgggaaattatgagattagtgaatggagtattgaatttgtccccataggtgggagtgcaagaccatgagtgaccacttatcaaacacacctcagtaaacagtcaggagagtgaggagtgtggtcctttcacctgcccaggttgtttctgttagattctgggcttggtctctggagtccaagaggcaggccccagtgaggtcatgcacttgctgtctgattttggccaagtcacctccctttgtggggactgttcctcatttgtttgaggggaatgttgatttggayggggattttccaaacagagctccttggacccttccctctaaggtctctggaaatgggaaaccctgcagaggggaggataaatgggccaggattcatcccttgaaccctgttcccaacagagccctctgtttttctcttctttacaacttggacctcccatgggactttgtttgaaagggagacttcattgctaaaagcaaactaaactaagtaggctaaaaggcaacaaactggagaaaatgtttaaggtcttctctagatctaagatcctatgacgttgaggaggtcatccaacatctctgagttttctctttcttgtatataaaatggaagtagctggcagggcagggcatgtgtcgttgatatatttttaatcctggtaaaaggaggaggttcaaggcagaaaactcatcaaagcttaatgacaacaatagcagctaacatttgtgaggctctaaggtaaaacccaaggctaagactcttcatgcaaactaggtcaagcagcaagctacaggttagaaacaggcaaggcagcaaaacagtcacatgggtgaactctgggactctgcagtcacactctgactctcctgcttgcactgggtgctcataagcaagctagttaacacctcagagccttggttttcccaccactaaatgcaaataataggcaatgctgagttattgcaaagttacttaatctttgcaatagccttctgtggtgagtggcatattcttattattattattagtcctagaagagtcagtgctcaaaggaatctgctttagagccttattgctccaagtgtggttcatgcatcagcaacatcagcatacttctggagttaaaatgcagattctcagatctcaggcttgacttactgacttagggtcatcatcttaaccagatctcccatgcacattaaatttgagaagcactgttttaaaatgcattagccgggtgcagtagttcatgcttgtaatctcagcactttgggaggccgaggcaggtggatcacatgaggtcaggagttcgagatcagcctgaccaacatggtgaaacctcatctctattaaaaatataaaattagctgggcatggtggcgcatacctgtaatcctagctactcaggaggctgaggcaggagaatcacttgaacctgggaggtggaggttgcagtgagccgagatcacaccattgcactccaacctgggcaacaagagcaaaactctgtctcaaaataaagaaagaaataagataaaataaaaagcataaatcacacaatgcataagttttggcatacacactagcataaagggattctcctacttataaacctagcccatctccttactctctatcacactagcccattgatgacaccaaaaactcccctcttaacactttagctgggcatggtggttcacgcctgtaatcccagcactttgggaggctgaggtgggcagagcacttgaggccaggagttcaagaccagcctgaccaacatggcaaaaccctgtctctactgaaaatgccaaaaaattagccaggcatggtggtacatgtctgtaatcccagctacttgggaggctgaggcatgagaatcactcaaacctggaaggtgacrgttgcggtgagctgagatcatgccactgcatcccagcctgggtgatagtgagaccctgtctcaaacaaacaaaaaaacaaaacacttccttactttggtttaaagtgttccataaaatattcctaagaggaaaaactttaaatcatcatcatgctgctagaatgtcagctcaacccatgcagatatttttgtctgttttgttctacagtgtatctcaagtgccaaggccattgcttgcgatatactgggtgctaagtgaatatctggccagtgaataaatgaattggccactgatatatcaatatggattaatttattcgacaggtcagcaaatttgagaagactggggacttggatcaggaatattttgaaggaagcttagaagagggaaaaggcccagagtgaaggatttttcagatatttggaggttaagaaaaaagatatgaccacgaggtggcggtagcacacataggctttcgggttgatgctttaacaggtttacactggggaaggtcctttatagcaggaattggtcaaggaggctatagtgtggagatggggtcctactcagaggggaaggagggcaagaggactcctaggaaagaagagaattggaaagggggcttacatggccaggtgaagtcacccagcagcacagcagggaatctctgggtcagagagctcctatgggctgcagtggcttgaggcctttatggcttggggcttatccttggccagcagatattggatacagtttcatggagtatacagagcaggcaggttctaaatggattaccataggcttattggggctatgtttaaagcaagtggatgtgcaaacatttgagtttggcttggtggggtattccaggtctggtctcagcctgcggtgaggaaattaataatcaaggggccagcactttatatagcacaaggcaggggccatggattaggaaatccaggcctggggttcatgcttaagtgaggcttttgttcaactgggaggcggtgcacaggtgactgggaggtggaggggctgagatgggaaagaaaagcacagagagggaagacaagcaagcctcaagaggattgtggcttcttccgtcacttctgggcccgatctactacaacactacagaatcaaggacaactgtttgaaaattcaaggctgaattcaggtctttcattggtgagtcagagttttcctacagactcactggggggcccttggccaagcaacctctcctccctaggcctcagttttcataaaaggagggaattgaactagatatgtgtcttcatcaggctgacctgcaggagctttttaccaaaagtggcctacctcctccatccagaggttctgattcacttgatctgggtgtgggacaaggacatcatgatgccagggctgaggccctgtggaccacatagctcctaagtcagggaccctgaggtcaagtcctcccagctctcccacctggccctggtagtgtctgtcaatacaatggagggagatggtctttaacttcaaagaaaggccacttaccgcatcagcagtacattttgactacatgttaatttgggttgaaggtagaagattttctattttctcaatcacaggctggctaaaacacatttcaagcttcattctggggggaacataaattggccttcaacagggggtgtcaaattggggtaaaattcttgcaaatcttggggaaaccaaataagtttttgttttctcttcacataactatgaaatccctagccacaacagcaaatctcaacatgcttgatattcagcccagttctctccataaaagtttctggagacaatgaaactcatctattgggttcatagctttaaacctgagaaagcttaaaaacagggaagattagctttgacgtcttgcctctgggtctccttcatgtggagctaaaagagtagttcaggaaatatccaccaggggtcagcattttgtacacacctgactgctctggaaagtgtttttgtttttttttttttaaatagaaacggggtttcaccattttgcccaggctggtgtccaactcccagactcaagcaatccgcccgcctcagcctcccaaagttctagcattaccgtgtgagccaccacacccggcctggaaagaatcttgacaaggcaaataatcagtttggttcatgctctcaaattagtgaaggtctggtttttcaagactctctaggtgtttcactctaaggaaaaatttattttcattcacctatcaatcaagctgaggtggggcctgactcctgacaagtatccaaatgttgcctattgccaatgtctagtctccaaggggtgacacccgagaaattctaagtcttctgtgcctgctttaaagtccacttcctgtcatcctgttatctgttgcagaccttttacctgtatgattgactggtgtgtggaattaacacttccctcctcggccgggggaacacacccacatgttggaactcagcacaggaatcccaacggcgtgcctacaagggaaatgcgtacttttgtgtgttggtgggtagtggacagaactcgtaaaagagatagataaaatacccaggcactcactacagtggggaatggatctgttcaggggccagctatgcctgcattctttcccagggacagttgacacagtcagatgactcaggaaacttgatttgcttggagtcagagcagaggaaagatcttagtgaccagggacctcaagctgccccacctgagcgctccacctccactccaaggggcttcctgccaagagatcagtatgtctgtgtgtagagtcaagacacatcttccttaggccacaatggagtcacactgacatcttcgccttccctccttggcagtatttattataagtcacaggagtttagttttctttcaactcaggcctgtggttggagcacagggagctaggctcgggctagatcttgctaacctagtaggcaatggtaaggattctagtctgtcctaaagcataaataggccttggacactctgaaatttgtcctttcaccaccccatgctctacttctaagtgctctctctccccatctgcaccccctagttcctacaaaaatctcctcaaagcgaggctcttggacaatttgttccatgaagacatcgagcacggtccataccagccctcaataaccccctcttctagactccatgaggacctgtagcccagacccctgatctgcatggcgcctctggggtctttccagaggtgtatgttttaaccatcccctgagcaccttaaagtaaagattcagtgttttgctgtttgtgctccctagagcacctgggcgcttatcggaaactgatgaaaactcactgccaacatattctgaagtatattcat

SEQ ID NO: 8705 - DNA, 35393 bp, Homo sapiens
cagtctaggttttttttcttttttcttttctttctttctttttttttttttttaaggcacagtctccctctgtccccaggctgaagtgcagtggcatgcaatcttggctcactgcaacctctgtctcccgggttcaagctatcctcctgcctgagtagctgggactacaggtgcgcaccaccacgcccagtgtatttttagtagagaagcggtttcaccatgttggccaggatggtcttcatctcttgacctcgtgattcgcccgcctctgcctcccaaagtgctgggattacaggcgtgagccactgcgcccggcctgcaaaggtttttaagggaactcattggtccttgggttcctcattttgtaacagaggatgcttgctgcgtgagacctccttctcagaaayggtccagagacagcaacccagcaacactgaggagtagagacttatttccatttctagatgaggaagctgaggacaagaggctaagggaccctcacacagcagggaagtggcagagctagaattcagaccgggtctgtctactcaaagcccatgttccattcacttcccttggctcctgtgggggcctatgaaagtgctcccccatcctggctggaaatgcatgatcttcttaatgtttttatgaagaagcatggccttatacatgccttataggcatgtaataagcttctggaacttcaaactcccaagagagagctgaaattataagtagagtcaggaaattctacaatgactttatgtttgtgtgaatgacattggtcatgaagggaattctgggatgtcaggggaggtttccaaccccaaagtgacatggaagcagaggccatgcaagctgcagaggcccttaggagacttctagaccaagcctcctttacagacagagaaactgagacctcaagaggggacaagagctattcatagtcacctgaagtcaggtgcaaggttgtgaccagacccagactccggacctggaccatgtactcaatgtccctgattgacacagcccaggccttggagtcagatgggctctcaggcttcgttccttgctcctgctctccaggaatgagcaggaacccctctaggacctgcccctgcagagtcatcaaccatggagacagcactccacactccctgaagacttccgggaaacagcccactgccttttgatgttgtgcttctgttattcctgggtgttgagagaagggacaggagcagatcacattcccgagtagttcattgtaaaatgtgctttttctatagcttggggatgttccctacagtcttaaagccctggccagctttctccggcacactcattcattcagcaaatcttacgaagtacctgctctgtgccagctcctactagacactgagatacccaggagagcgagctccaggccttgtccctgtagtcagtgccatggggaatgggaaagcaccatgcaatgcatactaggagatgggaacacagagctggtgttcccaacccaaccaagggagcagctcacacaggggaagcttcctggtggaagtgaatttaagcagaggcctgaagaatgaatcggagtgagacaggaaagtggaggtggaaagggattctcagaggcaagacagtgcatgggtgcactggagaaatttgtcagaaaacaagtgcttttcctggcggtctgagaatcagcaaggcgaaactgctgctctgaaggtcaacgctgtaagtcgatgttggatacctgctctacattcagccatgtggaggatacagaggaataccagcgggctctttgcaatcagaatgcttgacgagcaccatccaactttggagcccagagaacgaggttatctggggaacctctgccactgaaggcagcttcgttgtgaacacctccagcagccaagacctttctacctctcaaggcagccacaccatcatagcgagagtgatttccttaaattgaaaaaatggcctctctaatatgtctccccctgaccaccctagttttccttttagaggtagttatacaaaaaaggtctagagccttctccatgcaatagcccctcaaatatttgaagacggtgctcatgtttcacctccactccaactcgaatctctcctgttcattcttttgtttgtttgtttgtttgtttggaggcagagtcttgctctgtcacccaggccagagtgcagtggctcagtctcggctcactgcaacctccgcctcccagattcaagcaattctcctgcctcagcctcccgagtaactgagattataggcacttgccaccatgcccagccttttttgttttgttttgtttttttgtttttttagtagagacggggttttgccatgttgcccaggctggtctcgaactcctgacctcaggcaatgcgcccacctcggcctcccaaagttataggattacaggcatgagccactgagcccggcctgtttgtttttgagatggagtctcactcattctgtcgcccaggctggagtgcagtggcacgatcttggctcactgcaacctccgccgggagtctagggaccctagactccctgcttctcctgcctcattcttccagattcttcctcattcttcctgattctccctcattcttcctgattctcctgcctcagcctcccgagaagatgggactacaggtgtgcatcatcatgcctggctaatttttgtatttttagtagagacaaggtttcaccatgttggccaggctggtctcgaactcttggcctcaagtgatcagcccatctcagcctcccaaagtactggaattacaggcatgagccacggcgcctggcctcctttccattcttgaacatgtaacacagctgaagtatcatagtggacaatgccaaaatgcrggccagaccacatattctggaaggactttgtttttaagttcgtttgttttttgagacaaggtgtcactctgttgcccaggctgagtgctgtggtgcagtcatggctcaccgcagccttgatctcctgggctcaagcaattccctgcctcaggctcccaagtagctgggactacaggcatgtgccaccacacctggctaattttttattatttatagagacagtgtctcactatgttgcccaggctggctttaaactcctggactcaagcgatactccctccttggccttccaaaatgccgggattacaggcatgagccacggtgcctggcctctggaaggactttcaaagtgagatgttatgggctggagttatcaagaagggccatatcgcagaagaaaactgtcttggtgagattcgaggaaaagggaattggctaagggagtggaaatggcattccaggaggaggatagagccccaacaaaggcttgtctttaatgccgatttgttatgtttagtaaccttgctttcccttaatataaattagtgtatttcctatattaactttaggaaatgcagataagcaaagggaagaaaagaaaaatcacctacaattccactaccacccagagataacgcccctagtgttttcatctatatccatgaagacacgcagtttgctctacgtgtgcaggtgtgcgttttagccagggtggtactgtacataggttatgttatgcctcttttcacttgaaaaaatatgatgagtctttaccaggtcacgaaacatttttctccagcattattttggaagctgcatttgtcttgctttgggtggacataccattattcttttaaccaaacctctattgtcagacatggaggttgttttcatttttttctcctttttttttttttttttttttgagacggagtctcgctctgtcgcccaggcaggagtgcaatggtgcggtctcggttcactgcaacttccacatcctgggctcaagcaattctcctgcttcagcctcccgagcagctgggattacaggtgcccgccaccatgtccggctaatttttgtatttttagtagagacagggtttcgccacgctgcccaggctggtctcgaactcctgatctcaggtgatctgcccaccttggcctcccaaagtgcgggattacaggcatgagccaccacgccccacctatttttttcttaaactgttagaaatgaagtctgggtgttcccacattccttagcaatccaggtgtcttccttcccgttaattcctacataaccacaggccctcgaaactacaggatgcccttttcctccatcaagttccttcttccagtgcttctgagaggccccaaggaacactttcgtgttccacagacctgttggggctgcgtcttgtcctctcggccagccacttgggaccaaagcctgctcttctccctaagsgtcccttgtaacctgtttttctcgctgtagcttccccacactgccttgtcatcaaagtcatcaaaaaccctctatccatcatggttcattcagtagcacagaaacctctccagtctttcagaccaagggactttaatgtaaaggagctcgtcacccagaggatgaaggagctgggacactaatcaggacagacagttcagagatttccccaaagcaggaagctgtgccatcccaccaactgaaaggaaagatgaggggagaaggtgttgccagagccaggagctggcctccaaacaggaacaagaaagacataaggggttgcctggctgatggactgtccagagggagccagaactgcagagggatatggccattgctggggaagccactcaaacagaaaacgaggggagaaatgctctgatctctgcctccccagtcttcccccaggggctaaacctatcagaaagcagttgataaaggagtctagaaaatgtagtttcctgcagtttcaggaaatgactggcatgggccctaccttaattcctccaaagcacagcttagatttggctgttttgtcaaacaaactttagcaatcagggctgataacaattacaattcaggaaagaaaaacttaaacaccgatctcagcatatcacagcccattacacccaacccgttggcaggatccctgctaaaatttcgcttgcctttgtgtgcttggggccaggcaaactctccccaggggcaggaccctccaatcgtgtccaccctgaccagagtccaggccccagggcccttctaccttctccaggccctgcaggaaggagaaaaccatttcctaaacacctgtcccttcattcacacgaagctcatgtgcagatcctgccctacgtggcaaaatgatgggagagcagcctgaatcttcatcgtcccgaaccaaagccccattcatgaagttcagccccatctctagcacagcagaaagaatcactgaagtttgagttccattttttttctaaacttttgcagatcctagacccaaaggctcaaggtaagagcggctgggcttcctcacccccaacggcctctctaggggagagctgttcccaagcccaccccaagcgtggggacctgccttgatatggaggatcaaggaggagcatcgggtgccctcaatctcctcctgccagaaaagcaaaggagtcacagcttttcctttgctgcaagaaacattctgggaccttttttttccccctctgttgtccagttattttcatcagggtaaatcccctaggaatagaattattaaagcaaaagatatgtatgtggtgtaggcttttgatccacagtgccaaattgctttttgataaggctgcatatcgtggattattcttgccttttctgcccctcagctccttgataaaccacttgggatgaatcagccaccggaccagataaacaagccagcctgttrctattgctgttttctgcaagtcggaagggaactcccttagatcccgcccagaacctggaattccagagcacacagggccaggacacctttgtacccctgctccccaccggcacaggtcccacccacccccttctccccgccccatgcccgggtggagccagctgccagggcgccaagactcccagccctctctctgtgcacggcagagtagaggccaagggagggctctgtgccagccccgatgaggacgctgctgaccatcttgactgtgggatccctggctggtgagtgcccatctaccctgtggtcagacctcccttatcccaggggccaacgatcagggtcatctccccagcaccctccccagcccgagcatagccagtttcagtttctcccctgctagggctgagcagggtgccgggtgttcacggagaagcaaatgcccagcttagtttgctgggggcatgagagggtgcctcagaccctgggttcttccagggacccaaaggaccctcgggtcttgagggatatagccagctgtctgaactgggggtgctggatcgctgcacctcagtgaatggagaattggcctggaggaggcagacatccttcggtccctcaaacggtgtcggcacagtttgtaccatccttcctctgcctctcacttggcactggcctgacaggggaggaggaggaaggaccgggggaaacgaagcttgagttcactattgcctccctccatgcccctgcagggcctctttggccccttttgttatcatagatctgaaagagcattttctcctagagtggccaggtctgctacattaataggtcttaagacacaggactcatttggaaacaggtcttaagggcatagtgttcaaagccaataaagtgagcggagtggggggctcatcattatggagaacgttacatgagaccctagactctctctctgctctcctggtgcattgcatgaaattcagggaacttccttaggaagtcaaagcatagtcctgattgaggatggcgagcaggtatggcctcgrccaggccctccttgctcaagtgcaggacgaggcccacgaaaaggcagagcttcccaccttctctgccactgtcccgccagggctgcctgcgtcyccagrgcttccagctctgtgggaccccctccagtctgcttcccagcatcaagctgggcgttccaggaagatgtgaggcacccccttgaggcaccaagacacgtccctttagaccctcagccatactggttagaaatcctagaggctcccagccctttgagatgggggaccccaagaaatagcccttaggagattgtcaagggtcagctgyctcgcgctgcacacaccgggccctcacccscscaatcttaggctgactccagagcatgtggaattgtttcttgtttgtgtatttttccttagcttcccagctggttgacagaacattgtttttccacatgaatgtgaaaaaacaagttgccttttataaatccgccaggctgccaggctccacacaacacatgtctccccagatttcacaatatagactttcacccgggaagtgccgaagcaacacaggctgaggaatggatgatagatttgaggaggaaaaggagcgaggagggtgggagaagagggggagatcttgttagaccctgacatccctaaaagacaggagtgggcctaggttcacttaccccacttcaggaagctaactgcagttccctcctgaaaagtggtgccaacctccacgtagcccagggtcctttgccttggcaacatgcccccacctcagccaccagcctccttgcaacccagatgggccctctatttcccacccagaacactgacctcaaccagcaaccgttcccgctgcagactctaccccaagccttgatggagcctggcttctcaaagcccaccctcacccttctgccctgacccaccacccaaccagaagccactgttcaggtctgaccttgactggactcctttcctcaactttagactcagccctgaatccaggacccctccctccagaactgaccccaattccacccagcctcacatccaaacaagatgtcagctacatcctaaggctccacggcacagccgtcaccttgcgtagaggcagtagacccctccccgcgccatccctaaggccccattctggggactccaggaagcctgaagacattttgcagctgctgggccagaacccaaattcagagaggagggcagccttcgaggttggccagaggatgtgcagcggggtcggaccattcttccgtccccatcggtcctcgccaagcctgaggacccctcttgtgtgtagagttggagtaggggaatcaataactgtctgctccctcacaccttgggcccactggcagtcgtagwcgtgtctggggaaggagaggcacagacatattcaagacacacacccaggccgcaaggccttgacccagctggggttgcttaacattttcccacctgtttatttcccacgccagccggccagggcctcygagctcygagccagctgccagcttgggccgccattttcccgcaggctcttgctctccacagcccaagcctgggggcctgagggaagggttttataagttaaggactctttgtttacagtgcagattgctttagaggctgcagcccctccccagccccttccttgaggctcaggccctcactgcccttcccttaacagaagcagaagtgggctggacaaagacctagcctggaagagagggctgtggactcttcaatggccagcttctcttctcctctctcttctcctcctccctaaattcatccctttatcaggtgctcaggtccctgaagccccccaccctcatataaaagggtgaacaagatagccccctccctacagagcgaatgtcttcccttcccaggtctcctcccttcagactcaacacatgtacataggggcctgttagacactaaacacattcacagacgccaacccgctctatccgccccacaaccagtctagcactgggatgaatattgtaggttcttcacatgctaactgtgatgctgggcggcagctctctctgagcctcagctcattcatcaaatggggatagtgatagtgggcacgttgtcgtgaggatttaatgaagggagggacttgcctgaaagaggctgtgcacttcacaaatgccagtggctgctgttgtcattgttgtttgtctttcggtaaatcaaactatatccattttagagatgaggcaattgaagttctcgttgcttaaacaactttcccaaggccaccctgcccacgtgtgggctcagtcaagagcgcctcctccaccattgcttcatctgatcaacttggggcaagtcacttcttacacactttagttacatatctctaaaataagggtgaggacaccaacttcaggttgtgttaaaaagtgaatgagagacaataccaagcatcaatggcgatgtggagaaactgaacccctcaaacaatgctggtgggaatttragatggtgcagccataacatcctggacaatatatgagaccccatcactacaaaaaatttaaaaataaattagacggatgtggtggtrcatgtctgtagtcccagctacacaggaggctgaggtgcgaggattgcttaagcccaggaagtcgaggctgcagtgagccatgatcacgccactgcactccarcctgggggacagagcaagaccctgtctcaaagacmaaaaaaatggtgtggccactttagaaaatagttcgacagttcttcaaaaggttaaagatagagctactatataacctaccaaattccactcttagatatatacccaagacaactgaaaacatatgtccacttataaaattgaacacggtgttcacagcagcattattcatggtagccaaaaagtagaaacaacccaaatgtcctgatgagtggataaacaaaatgtggtatatcacacaatggaatattattcagccctaaaaaggaagtactaatccatgctaccacacgtgtgaaccttgaaaacattatgctaagtgaaagaagccagccaagctctatttacataaaaagtctagagtagggacattcacagacacaggaagtagattcgtggttgtcagggtttaggggaggagaagaatgggtggagtgactgctaatgggcatgcagtttctttttggggtgctaaaaatgttctggaattagataatagcgatgattgcacaacgttgtgaaaatgctaagaaaccattgaactgaacactgtaaggtggtgacatttatggaatgtgaatcacaacccattgcaaagcaaaatggctgagaatggatggttggttagaacagcgtggggagcatcccctcttgctggtccatttgtagaaggctgggggccagggtctccctgcccacccaccaggctggcatcttgaaagcaaagrcactttgcatgaaatttatatggggcaggactctgactgagcccatacatgggcagggtgaccctgggaaagcccctgctcaccctcctcccaccctcctgcagctcacgcccctgaggacccctcggatctgctccagcacgtgaaattccagtccagcaactttgaaaacatcctgacgtgggacagcgggccrgagggcaccccagacacggtctacagcatcgagtataagacgtaggcttctctcttgaccccacctcctttgactgatctgaagccagcccctctccaaggaattcccctcctctccatatgttcccatgtccccaccaggactggtgtcacatagcccctcccagataaagctttgctcctttatgtttcttttgcagagggagaataatataagggtaaaaagtacaggtgatagggtcaggctgtctgggcttaaatgccgctctcgcctgtataaccttgggcaggtaacctcacgaagcctcagtttctccacccacaaagtgaggacaatgatagcactttcatcacagggttgttgggtgggttaaacaagataaagtcattagcacttgtgcctggaaawttataagctaccaataattgttttattattattagtgagactaggtcaaccgaagatgcacccagcccctctagcccacgctcctgttcctgctcctctccctcccatgcaggtgaggaggggtggcctgggctcaggagtcctcaaacctggcttccactcctggtcatgccacgttgtcctgtagcaagtcacttccccctctctgagcctcatttctctcatctgtaaaatggggataacagggcccacatcaaaggactatggtgatgacgagcccagaatgtggactcagactggctgggttcaaatcctggctctccacatgcacacttcaaacacgtgggcaatttacttctttgagcctcatcttctttgtttgaaaaataaacagaataggctgggcacagtggctcacacctataatctcagcactttcagaggctgaggcaggtggatcacttgaggttaggagttcgagaccagcctgaccaacagggtggccatactgtctctactaaaatacaaaaattagccaggcatggtggtgcactcctgtaatcccagctactcgggaggctgaggcaggagaatcactcgaaccccagaggtagaagttgcagtgagccaagactgcaccactgcactccagcctgagtgacagagcgaggctgtgtctcaagaaaaaaaaaaaaaaagaaaggaaggaataaagaaagaaaaagagaagaatgcatatgcctcagagaatcattgtgagaacaaaatgagatcattcgcataaagggcctgggccactgaacgtgctaagtaaatatcagatctccttggcattattaataagccacaggcctagcgctggccttttcatcaccacggtgacttggccccttcctgacctgcaggtacggagagagggactgggtggcaaagaagggctgtcagcggatcacccggaagtcctgcaacctgacggtggagacgggcaacctcacggagctctactatgccagggtcaccgctgtcagtgcgggaggccggtcagccaccaagatgactgacaggttcagctctctgcagcacagtgagttggagcccctgtgggtttcaggggagggaagaggaaagcgcaggtgtttgcrgggtgggatggcctcttcccctctggagtgggtggagggtccagaaggggctctctgcaaggggaggggcagctggggatgtggcttttagggaagccccccacccccaccaattacagtgtgttcctagcaggtttgttcacttttctccacctccamcccaacctccctagttcagaccacccttatcttgacccccgactgcagtcaaggccacctaacttgtttccccaactctcctctttaccacctcctccagcccattctccacagagcatttagagagatctcctcaacacataaatcccaccttctcttctcagcttaaaaccctcgggcagcttctcatgactctacaaataagatccaactccttgccacggcccacgaggccctgcctatcctggtcctcatcttgaacatgtcttcccaatgcatcgagcagccaagcttctgacagtccctgcctcgggttccttgctgctcccactctctgggggcacttctgagctcttcacatgactggttcttttatagtcctcacggctcagcttcaacatcctaagtcagtgtccccacctccagccctgatgacctgatttctgtaggccaccatctgtgattctctagtgcaatacagggcttattgtcttcatcgctcagatcacacgctgcaattactgtgtttgctcacacatgttatcatctgcctccccctctaaaatgtgagctctagaactgtatgtgtgggcggcagaatccactgcattcccagccctcagcatagtgcctggcacatagaagattctcaatagccaggcgtggtggctcacacttgtaatcccagcactttrggaggctgaggcaagagsatcacttgagcctaggagttcaagaccagcctggggaacacagtgagaccccatctctacaaaaaatttaaaaattagctgggtgtggtggcacacacttgtagtcccagctactcaggaggttgaagtgggagggtagcttgaacccaggaggtcaagactgcagtgagctgggattgccccactgcactccaacttaggtgacacagtgagatcctatctcaaaaaaataaaaaagatattcagtaaatgaatggttgagtggacagcagttgctgatatggtttggccatgtccccacccaaatctcatcttgaattgtagttcccataatcctgtcttgtgggaaggacccagtaggaggtaactgaatgatggggacggttccccccatgctattctcatgatagtgggtacgttcttgtgagatctgatggttttataaggggcttccccctttgcttggttctcattttccttcctgccaccatgtgaggaagaacatgtttgcctcccattttgtaagtttcctgattgtaagtttcctgaggcctccccagccatgtggaactgtgagtcagttaaacctctttcctttataaattacccagtctgaggtgtgtctttattagcagtgtgagaatggactaatatagttgccaaactccccacacaagctaagcgtgtgacgatgttcaccaactgactttatagtcacacatagctttttaagaaaataaaaaataaaattaagtaaaatattgtttttttaacctggcttgttcagtgaattcacattcattgtagaaaatgtgtgaaatatagaaatatacaaagaaaaataaaagtcacccaaaatgatcttaacattgtaacataactgcagatactagcagccgtatctactttgcaatctggcattgcttttttgtcttaggttctttttctccatatattggtatcatgaacatttacccatatcattaaacattttgcacaacaagatatttcacagtgcaaaataatccattctagggagatactctaatttacttatgtatttccctttttgaggacatacagctcagtttttcaattttattagcagcactgaagtaaacattgttctgactcagatatcttcaatcttggaggccaaaggatcattgaggaatttttacaaattagattcagggtaaatgaggtccatgaatccctgaagttggatgcaagatttttgtatatatrcattttggcaggaagaagacccacagcattcatcacattctcaaaggagtctgtaaaccagcaaaggtaatttggttatttggaaaattccatcttgagagagacagaagtcttcagcctgatctttgaggctgcatcaatagtattaggccccaaacattatttaggatgtgtagttgatgtcattgacatccccaaagctgtcatactcaatagatgagggaggaagggtgctctaggctgacttaaggtggggacgcagggggctgggatgtgtgggggcaagccaaaggcatgaccaagctaggggactggtgcccctccccctgagttcttctcatccactcttggtcatccctttgccagcctgaaacccaaacaccagggcttgtagaaacttttctcttttcactgtttgtttagccgttgctttcagaagcatagctggcactggagtggaaggagagagggagcagtcattttccactgtccaaggttgcctcagacactacccacygattctgactttttcttttctcttttctctctccctatccccagctaccctcaagccacctgatgtgacctgtatcyccaaagtgagatcgattcagatgattgttcatcctacccccacgccmatccgtgcaggcgatggccaccggctaaccctggaagacatcttccatgacctgttctaccacttagagctccaggtcaaccgcacctaccaaatggtgagtgtatgttgcaccctggtctttctctgcctaggaagcctcttccctcccaattagatctgagttgctttaagaaaaaaaggggacatgttatgtaaattagcatttcccaaaacatgtcccttgagaggctccttgaagcctggaaatcatcacaaatgacaacttttctcttgtagattcacacacacaatagcatgctaaaagctctgacaagtcctgcagagccaagactccactatcaatttgttttgttgttttgttttgttttttatttatttatttttattttattattattatactttaagttttagggtaaatgtgcaggttagctacatatgtatacatgtgccatgctggtgtgctgcacccattaactcgtcatttagcattaggtatattatcaatttgtttaatacaatttctccagaatttatttgaccagagaagctgctttttttgcataatatttacattgttttttgtttaacaccttctcacatcctggggaacaacctctattaatatcttcagatgttcacattagaaaatgctagaatcaatttctactgctgcagtagttttccaatatttgcaggaactatatacaggcaatgtggaaggatgagtaataataagaggtggaaggcaagggcatacattctcaaatagtacatgaattatttcttttcgtattcagaaaatatttggtaccccctaccctcagcatgtgccaccaatccacaattcagttaaatgaatatttatttcctactttgtggtttctgcatgcaaggagcttataatctagggggtgaaaaggaagttaaaacaagaattcaaatagctataggtagaggaaaatatgggtattgggaggtggggcaggatgtcagcacagcaagatttgaaagacttccagaaaacttttaggaagccaaaaatgacataatatgcatatattacctggcatgccgcagaaattggtactggcttccagaaagcctaatatgcataatatgcatattatgtcattaatagtcatatattacctggcatccccagaaattggtattggctttctggaagccagtatcaatttctgaggctccaggtaatacatgcatattatgtcatttaatcttcaccacggccttgtgaggcaggttctatcatctccattgtctagatgagggaacgaagagaagttaaaagtcacttgctcagattgttcagcaaataatagggtagacaggattcaaatccagctctgtttagcccacatttctcccaccactggcctgcctatactgccccaccatgatcagagagaaaagcagcaaaacttaagccatttaaaaaaaagagagacggggcctcactgtgttgcccaggctggtctcaaactcctgggctcaagagatcctcctgcctcagcctcccaaagtgctgggttgacaggcatgagccaccgcacccggccaacttaagacatttttgaaaagcacagaactgcccactttgacaagagcataaagacatgtaaaacagtttcttaaaacatggtcccagccaggcacggtggctcacgcctgtaatcccagcactttgggaggccgaggcgggcggatcacgaggtcaggagatgcagaccatcctggctaacacggtgaaaccctgtccctattaaaaaatacaaaaaattagccgggcatggtagtgggcgcctgtagtctcagctactcaggaggctgaggtagaagaatggcgtgaacccgggaggtggagcttgcagtgggccaagatcgcgccactgcactccagcctgggcgacagagcaagactccatctcaaaaaaaaaaaaaaaacacacacacaaaaaccatggtcccaaacaaacagcatcagaatctcctgcagcacttgtttaaaatgcagattcttgggtccccttccagtcaacttcatcaagttattgcacttgcatccctgggatctgaattttagtgagcaacccaggcgcttcttccccaacgcaaagcttgagaacctctgacgtggagggaccccgggagataaacctcagaagactggatgggactatgctgtagaagggatagggtggtggaggggacgaatttttgtttctttcggtagttgggggagccactagagattactaagcagggagagtccttatcacaactattttwtggtaaatatttagggtcttattaaatattttattgttgatttctaatttaattcaatttgtggtcagagaacacacgctgtatgatttcagtccttttaaatttatcgaggcttgtgttatagcccagcctatggcctgtcctggtgaacgttccttgtgcacctgaaaagaatgtatattttgcagttggttggtggagtgcgctataaatatcaattaggtaaaggtgattaattgtgttattcagatcttctatgtctttcctgatttaggtgagaggtcaattggtcgtttaattgttgaaaatagtaaactctccaactataattgtggatttgtctattttccctttaattctgtgcatttttgcttcgtgcattttgaaactcagttattaaatacatatatatttatgattgttgtatcttcctgatagattgaaccttctgtcataggaattgttcctttttatttgtagtcatactctttgtattgaagtctactttatcgatattaatatagacactccagccttcttatggtttgcataatatatgtttttacattcattttcaatctgcctctgttattatatttaaaatgtatctcttgcagacagctctgacagcctttacctttttttgacattaattcacatgccataaaattcattcttttaaagcatacaattcaggtgttacttgcctattcacaaagttgtgaaaccatcaccactatctaattctcccttatcaatctttcttcaagttctctattttttctgtcatttccaaaatgtttttgagataattcagtgggtttttaaatttcagataataatatctagaatttttcaactctaaagttcctagattttatagtttccatattctactgagattttctattcattcattcaatatgagcttattttgtttcacttcctggagcattgttataccgctgctttaaaatcattgttggccaggtgaggtggcccacgcctgtaatcccagcactttgggaggccaaagtgggtggatcacttgaggtcaggagttcaagaccatcctggccagtgtggtaaaaccccatctctactaaaaatacaaaaatcagctgggcatggtggcaggtgcctgtaatcccagctactcaggaggctgaggcaggagaatcatttgaacctgggaggcggaggttgcagtgagctgagattgcaccactgcactccaacctgggtgacagagtaagactgtgtctcaaataaaataaaatcattgtctgctaattcaacattttggtcatcagggtcagtcactattatcttttctcttgaatatgggtcgcatattctttctttgtatgtctaacaattttgaaatgtatcctggacattgtgttgaaattactgtagattctgttatattcctccaaagagtgttggtttggtttcatccggttttggtaggcaattaatttggctgaactccaaactctgaaatctctcttctttttttgttggttaactttacctgggctgcttggagtctaccccattcatgmctactttaggggccggtcagggatttgagcagagtttatatacagagtttgggcctccttctctacactctcccctgtctgtgctttctcccctcattttccagctgctgtgattattccaagccctgccttttgggtattcaagccactgagaataaagggtttctgtctaggtttagccattccacagggtgtagactgaggtctgccttcaggctacaagacagtaaaaatgggaaatgtacccatcgacatttctcctctctccaatatatgcctgcttttattttctctccaatgcttttaagtagttggttttcattttgcttagaatttatagttgttattttggggatgtttggtccaatagaagatataaattactaggattagaatgaagaaagatcaaatatggaaatggaagagatatcaggctggcaagtcaaaagattattgcaatggtataggctggaaatgagggcctgaaccaggatggaggtcgtgaaaaacttgggaaaggaggaatcagggccttggcaactctcctggagttatgtctcatgatatgtaatgtgtccagttccaaccacatgagttccacaaaacaataagttaaaaaatttatttatgtacttcttcactcactgtcaccaccatccccataaacacacacaaaagaaaacagtaaattaccctcaaccttggcctccatgtgcctgaaaaagagaaggcagagctgaaatacaaagagccaaagaaaattctcagtttttgaactcccgagaacacaggttctggccctttaaaggaagatttctggatcctttaagggcaatttgataccaaagatatgagaggggatttgtccaaaatggcttcaaggtttaggccctggagattagaagaagagtgatgctattatcaaaattagagaatcaaaagcagatttgggtttggggtctgggatggggccagccccagagagaggagggcagcatgttcggacatgttgacttagagatgctcacatggtactattcagcagggagctggcagggcccatcagaaactctacagctcttcctgagataagtttgggagttatccacacatcggtgctcacagcagccatgggttcagataagatcactaagtggctggagagtatgtgagagagaaggaaatggttgaagagcaaatcttgcagaacaacattgaggggctaaaaccagcgaaagaccagtcagagaggtaggaggagagccagacaggataacatgtggcagccatgggagaggagttctgggtcaaaaaggtgagagatacacagaagaacgagaatcaaaacacagttccagcagaaggattggcagatgcaaagaaacaagggctttcttatgcaaggtaggtgtttacccgagtggcaggtatccagcattgatgagcctgcagagccaggtgggctgcagagacaaatgagtctggactggaagccaggcaccaggactctattctgtaaatatgggtgaggccatcaaagccttttgaatagaagagcattataatgagattgtcttttagaaagattcctataaacactaggatgaatatggaagtgaacaggggcaaacccagagatgggcgaccatgaaagaggctactgctagagtccaggctgaagccttgaggcccaattaaggcagaagcaatgaggaaagaaagaaaggaatgggtgttcaaaaagtttatgatgtttaaccacaaaaaggtgaaggacaagaggaattggaagaaggagggatagtgggagcgtgggagggtggtggaggtcataatgacagctgccattatgtgtgtataaccacacattttatatatatatatatatatawgtatataaccacattatatagtgtgtataaccactgcctatgggccagacactattgcaagtgaaaggcacacgtgcttggagactgattggatttggggataaagcagaagggaggggaatggaaacagaggctgaagacagacccatcagcatcaaaccagaatccaggaggagcgagcaagcttccttgggctctatgtggagatcggtgtgtaacaggaatcacattccattctctgtccaattcagcaccttggagggaagcagagagaatatgagttcttyggcctgacccctgacacagagttccttggcaccatcatgatttgcrttcccacctggkccaaggagagtgccccctacatgtgccgagtgaagacacygccaggtgagttcggctgaaaccagagggaggtggggctcccgaattcaagtcttgactcttctctttcctccctgtaaccaaggtgagacttggcaacactctagaaaaccatggaagggttatcagtgtgttattgaagtcaatctttgtttatccataaaagagttggctgatgagttatcaaagcaaatgtttgattctcaccctccagcctatgtctggatttcccctctctgacaggccttatgtgtaccttggcaaagcaaactcaccttaatattaacccaggtgagatatactggagggaaaatctgcaggggggaagcagagaagataaaaagatccctcaatatcttccaaagtcaaataataataatggtatcatgataactagcatttctgcagtgctaactgggaaccaggcacaaccaagggcaagcctcatgagcagtctatgaggtaggtattattttcatcctcattttacagatgaagaacctgaggttcagagtggttaggtaacttgcccatggccgggcacagtggctcacacctgtaaaccaaacactttgggaggccaaggcaggaggatcacttgagcccagaagtttaagaccagcctgggaaacagggcaaaaccccatctccacaaaaaaatcaaaaacttagctaggtatggtggcgtgcatctgtggtcccagctacacagaaggctgaggcaagaggatcacttgagcccaggaggttgaagctgcaaagagctatgtttgcaccactgcactccagcctggatgacagagtgagaccttgtctcggaaaaaaaaaaaaaagtgacttgcccaaggtcacacaggtgctgagggatggaatgaggcctaattctagaggccatgctcttaccacagagctactatagatacagttgggttttttgtgggtttttattgttttttgtttttgagacagagtcttactctgtcactcaggctggagtgcagtggcacaatctcggctcactacaacttctgcttcccagtttcaagaaattctcccacctcagcctcccaagtagctgggattacaggtgtgtgccaccatgcctggctaatttttttttttttttttttgtatttttagtagagacggagtttcatcctgttgctcaggctggtcttgatctcctggcctcaagtgatccacccacctcagcctcccaaaatgctgggattacaggcatgagccatcacgcccagcctagatatagttttgaatcatctgctcagtgagatggtcccttcctctagcacactgaaacttgattctcatcacaagcatcatgatgtttttattagtgtttcttttcatagacggagggaaacgttgtattgctcagagctgcaggtttagaggatgaaggtgacggcagtggatgtgatagatttggtaaaacagtctccactttatcctcatgttcagattcatgatgtcagtaagtgatttcagttccaaccatgccaacattcagaatagagttgagtttgcaagctggacattgygtgtggcatagtggaaagagaagtaccgtgtgaggaatgagaaggcacggtattagtcagatgtcagccaaccacgtgcctgggggagtcactcagcctctgggagcctgatccctcatctgacaaatagggatgctgatgcctgggctgaggtgataatcagaggccaggcagctgccagagctgggccctagaaaatgacactctggtcctcaggtttgttcggaaactcatcacttttccaaacagcccacaagagactgatttctccacctgaatcccagtgcaccaattggcaggggagctatgcctcayggaacagccaacactggccacttgcatggggcatgcccttcctggggcaaaggctgctagggagctcagaatagaacttggcaagaggagaactagaaaaaggaaactgacgttctggggctaagctgggagtgtttgtatgattcatgacccccttccctggactgtcctagataaatctcagctgctcctggcccatgggacctggcccaccagctttttgacaatgtgaagaccactccacccttacccacaacacccttctgttgccttactttgtcttgcttataatgagataccattttttcctaagactatagcttttatataaatcacacttcctggtggctacttcttgctgacrtatagaaggcaccttatccttaaaaatatatttaaaacaattcctacatttattaggttctactatattgccaagcaaatagttgtgccaaatgctttacatatattatttaatctttattattacatgtaacatatattatttaatctttacaacaatcctgtaagctgggtagcatcatcctcgttttacagaggaggaactctggctcagagaggttaagcaacttccctgtgaccgcacagctgcttggggaacctgattgattcatctggttctgaaggctgggctctacccaccactttgcaactttgtttacagtgagccccctgtactgcacacttcttcctcctacttccatttcagagtgatgcatcctgcccttgactgtgtatcctgacgtctgcattaccctcagaatcccctttacctacctctccgtagataaacagggagggtcacagagcattgtcccagcatcttgatgacggaagaggctctaagggccacctcacctcatatcctactcttacagatgaggaaactgaggcttccttgcagagtggcagggaggatgagttttgagttacacatgtaactccactgagtagctgtgtgaccttggtcaggtcacttaacctctctgggactcagctttgttatccataggaagggagcgtccctacccctctgtgatgtgtttgatgatgtagtgagataacataggtagagcacccagctctacatgatcatacagatcatggcctgtagtaggagttcaaccactgctggctactgttattattaaagggtagaccagagagggtcgtgcagcaggaaggatgctcagcatatctgtggcagagccaggcctctaacaccctgtattccttactctcaggctggtggtgtttttatattccatccagcctccctatgggtgaaatggcaatgtatccaatacacacagtgtgaaatggaaatatgtcaagccagagaccattccatgtccctattctgtcctggaacaaacagcagtggttttccaggaatgttatagacattcgggtggggtctttttcctggagtagggatgggggtaacatgtsacaggagacagggtttcactgaagtgggaagctgacccagagaggcccaagctcgtgggctaggggaggatcgaggagtgggctagaagtagaggttccagcagtacccggagttcacagtgatcgccgaggtcattggagctattgataaactctccaagctgaggctgcacaggggccaggaagagagggagggtgattagctggcccctggactgcaggggtcttgactctctgagtcaccttccctctgttgcaaactgtcagttttaccaaaaactccaacaacctcttcctccataagtccttcacaagccccacttggactggtgacaggaagtgtgtcctgcctggaactggctgcacccatcccaaagatgctgagacacagggagaggctcaggcactagagccctagtcatccctctcccctccattttagacaggacagtgccttcccaggctcccttcttgaccaagatcttccctgatgcccagccccttatcttggtagggaggtggagaggacaggcctccctgttttcacttctcccctccctctgcctctaccctaccagggaggcaggaccacccttagactcaggcaaaaggggcctttccctgcacccagcactttagaaggcccttctctggccctgtcctggccattcccctccttgcaagatgaagactccatacaacaaagggggcagatccatctggatcctgtgacctcctttctagatcacattgtgagtacctgggaccctgaaactctctgtacatatggcccagagcctgtgatccgtctaggcagtcctcttttgggggtacttcctcatgagggcagacactgctgacatgtagtgcagacccttggcccaaaggatgaccaacaggtggctatttggaggggacatggatgagctcgaccatgagggctggggcatctatacacatgtgcgtgagggccctggcagtgtgggatggaactgggctgggctgggctgggctgggggcctgcagtgygctgcgggctttccctgtacctccccacttcagcacagtacctagagaagtccaagaactctgaattaaaatatggcatcccaggtggttgtaaaaaatctttttgttaaggtggaaacctcgaacattttatttatttaacagtgtaaaaatataatttgtaaattctgactatttagatgtacagtatatggacttccatttgtgatcttgcattctgacggtaggagaggccttgccagcccagccagagagggttttcagcatccacatgtggggccagacccaaccgggcccaggcagagccsagcctcacgcttccttctctggcccctttggtttcccagaccggacatggacctactccttctccggagccttcctgttctccatgggcttcctcgtcgcagtactctgctacctgagctacagatatgtcaccaagccgcctgcacctcccaactccctggtgagccatccccccagggtgggagggagaggtccaggggagggcctgggctccgaggtccccagttgtccccaaaatgcagggatccacagacaaagcaggagatgggcctgctctctccattcacggagctcacagtcccagctaaagtcaacggacgtgtagcccagcaggtctcaggacacattgaagtggggtgggtgatcaggaatagtagacatggaataaaaaacccacatggcttggaagtgtccagcaccaggagggtagtgtgggacttgagtgagcagcaaggcaacgagggaggaatggtgggcgccaggagagccgtggcactcatgccctgtctaaatgggcagccgggcaccaccatgtgggaatgcaggcccagcactgcctgatcttcatgtttttcaagagaagccagagtttcagattatattgtggaatctcccaattttcaaatattcagaactaattttttaaacagatttttttttttttgagatggagtctccctctgtcacccaggctggagtgcagtggcatgatctcgtctcagcacaacctccacctcccgagttcaagcgattctcctgcctcatcctcccaagtagctgggattacaggcatgcaccaccaccacacctggctaatttttgtatttttagtagagacgggttttaccatgttggccaggctggtctcaaactcctgacttcaggtgatctacccacctcggcctcccaaagtgctgggattacaagcgtgagccactgcacctggccattttaaacagaaatttttaaatggcaaaactaattgttaagtggaaagccctttgttacagttcttttagaattgctgtagcaagtgaagaccagaaccaccccccacccaaaaaataaaaccaccccccacccaaaaaataaaaataaaatggaaagccctacatcagccacacaaatcacatcagcagcccccacctgacgccagtgccgcctctgctagagcagcaaggccactgcagaagccatgagctgagccacctgaggcacccggagcctgctcttgcccatcggagggacagaggagctctgagggagttttgctcaatgtgcaagtccagatgaagcattttctgtaaagctctcccggtctctcctggctccttcttttcccaccctgaccctgtattaggccctcagggacccgtgggccaagcaacaatgcgggccaccacctcgagatcatgccccaaggcaaccccaaatcctggtcatctactccctggattatccgcctcctggagaaaccagagcccagatctctctccctgagataacccaggctttagaaccaaagagctgagagaccctgtcccttcagagaggcacttgcacctagaggagtctctgggragcagatggggatatgggacagacgcatcttgaaaaagcccccagatgcctccctatggaggacctcacccacccacatcaccagtagggagcttgggacttaccctaaccacaggggggtgactgttgtcgtccctgcacagaacgtccagcgagtcctgactttccagccgctgcgcttcatccaggagcacgtcctgatccctgtctttgacctcagcggccccagcagtctggcccagcctgtccagtactcccagatcagggtgtctggacccagggagccygcaggagctccacagcggcatagcctgtccgagatcacctacttagggcagccagacatctccatcctccagccctccaacgtgccacctccccagatcctctccccactgtcctatgccccaaacgctgcccctgaggtygggcccccatcctatgcacctcaggtgacccccgaagctcaattcccattctacgccccacaggccatctctaaggtccagccttcctcctatgcccctcaagccactccggacagctggcctccctcctatggggtatgcrtggaaggttctggcaaagactcccccactgggacactttctagtcctaaacaccttaggcctaaaggtcagcttcagaaagagccaccagctggaagctgcatgttaggtggcctttctctgcaggaggtgacctccttggctatggaggaatcccaagaagcaaaatcattgcaccagcccctggggatttgcacagacagaacatctgacccaaatgtgctacacagtggggaggaagggacaccacagtacctaaagggccagctccccctcctctcctcagtccagatcgagggccaccccatgtccctccctttgcaacctccttccsgtccatgttccccctcggaccaaggtccaagtccctggggcctgctggagtcccttgtgtgtcccaaggatgaagccaagagcccagcccctgagacctcagacctggagcagcccacagaactggattctcttttcagaggcctggccctgactgtgcagtgggagtcctgaggggaatgggaaaggcttggtgcttcctccctgtccctacccagtgtcacatccttggctgtcaatcccatgcctgcccaygccacacactctgcgatctggcctcagacgggtgcccttgagagaagcagagggagtggcatgcagggcccctgccatgggtgcgctcctcacyggarcaaagcagcatgataaggactgcagcgggggagctctggggagcagcttgtgtagacaagcgcgtgctcgctgagccctgcaaggcagaaatgacagtgcaaggaggaaatgcagggaaactcccgaggtccagagccccacctcctaacaccatggattcaaagtgctcagggaatttgcctctccttgccccattcctggccagtttcacaatctagctcgacagagcatgaggcccctgcctcttctgtcattgttcaaaggtgggaagagagcctggaaaagaaccaggcctggaaaagaaccagaaggaggctgggcagaaccagaacaacctgcacttctgccaaggccagggccagcaggacggcaggactctagggaggggtgtggcctgcagctcattcccagccagggcaactgcctgacgttgcacgatttcagcttcattcctctgatagaacaaagcgaaatgcaggtccaccagggagggagacacacaagccttttctgcaggcaggagtttcagaccctatcctgagaatggggtttgaaaggaaggtgagggctgtggcccctggacgggtacaataacacactgtactgatgtcacaactttgcaagctctgccttgggttcagcccatctgggctcaaattccagcctcaccactcacaagctgtgtgacttcaaacaaatgaaatcagtgcccagaacctcggtttcctcatctgtaatgtggggatcataacacctacctcatggagttgtggtgaagatgaaatgaagtcatgtctttaaagtgcttaatagtgcctggtacatgggcagtgcccaataaacggtagctatttcctgttgtgattttttttttaaactacgttacacaaggagtgaccccctcccccaattcggattggcttcagacacacctggcattttctcatgggcttaaatgacctggatttcctcaggacaggcaaagctagaggggtctggggtgggaaagaggagggactgcagggccttctagagacaagagttcagagacaaatgatgtggaaccttctccctgagatcgtaggcagaagccattgtgggtggcagtggtaatctcagacggcctctgtccatccagcctccctgatcccccacagaggcagtgttgcacactctgtgctctcagactgctgccataccctccgtatcactgcatctcagacgacccctaccatgaggaagccaaagtccagagggagaggggacctacccgagatcccactattgaggctgtgacagagttggagtgcaaacctagggctttttgtcctcatcgagagaggaagctttccacacctgcttggattcttggaggatgagactagtggaggctaaggaggggaggcctcctaatggggtccccaagagaaaagtgctcctggtcaccttgctccaaagtctttttgtttgtttgttttgtttttccttttggagaaagggtctcaccctgtggcctaggctggagtgcagtggcatgaacacagtttactgcagccttgacctcctggactcaagtgatcctcctacttcagcctcccgagtagctgggactacaggtgcatgccaccatgcccagataatttttggtatttttggtagagatggggtttcgccatgttgcccaggctggtcttgaactcatgggctcaagtgattgtcttgcctcagcctcccaagtagttggaattacaggcgtgagccaccacacctgccctccaaagccttttctgaacatttctgagaaagaggatggaacaccagtcacctcagagggacccttcccagagtggacagtgtccttctcttcccaggtacatctcctcttctcttccccacccctcccctttcctgggacacagtgacaggtggtggtgttcttatctgatggtaattaatgtttaacatctcctcggtgtcactggtttagacccaacacctccgtgcagagggatgggtctacctggacagccccccccagcccattcacccctccacggcagccaagtcagccggatgacggctcccctctccccacccactgcaaacaagtctacttcctgttgcttgggtcacacttggccaaaggttaactgtcttcaccttgtttattggtgaaaaacaacctaacaggtggactattctcaccaagtgagacccaggagctacagaagttttttattaagaccaggcgcagtggctcacgcctgtaatcccagcacttttggaggccaaggtgggtggatcacctgaggttgggagttccagaccagtctggccaacatgagaccccctctctactaaaagtacaaaattagctgggcatggtggcaggcgcctgtaatcccagctgcttgggaggctgaggcaggaggatcacttgaacccgggtggcggggtttgcagtgagccaaaatccagccattgcactccagcctgggcaacagagcgagactccatctcaaaaaagaagttttattaaaagccataaatatctcttccaactcacagtaacacgaagctctttgccctcctccgggtgacaaacatttcagaaatgattctgggagggtggagtctgagtgtctgaagagagggatggatggcttcgagtctgtgactcacccctcctcaggttggccctgtctgcactgaggggcggggaccagactgcatgacccctgaggtcccatgcctcccaggcagcccaggcctgcagatagagctggaaccagccagaaggcagagcgtccgcataccctggagctggctggggacctcatcgttcctgagagtcctgggtccgatcccatttccaggaatctccacagccccaccctgcccagcaagagaggtgattctccaagttttcacttgcctacaaggtatggcacagtcaagcccaggaataaatgactagtaatataatagtagcagtagtcaaagtcatatgaaagagaagaagtcaaccgtgttgcttggccgttatgtacttgatcattcatcctcctggtacccttctctccatgataggttgtattattgatatttcgcaaaggaggaaaatgtgtctcagagagattacttgccctagttcatgaaaatactctgggaagcttactaaaaatacagcttccccaagcccaccccagacctgctaaactcacagtttctaggaatctggttgtttgtttttgagacagagcctcactttgttacccaggctggattgcagtagcatgatcacagctcactgcagcctccacctccctggctcaggtgatcctctcacctcagcctcccaagtagctgggactacaaacacccaccgccatgcctgctaacttttgtattttttgtatttttgtcaacaggtttcaccctgttgaccaggctagcctcaaactcctggacccaagtgatcctccaccttggcctcccaaagtgctggggggtatctgcatttttcataaacttctttggtgattcctctgaagcaagttgagggaacagtgccgttacaccatcactttctctctccatagcctcaaatcagcgccctagagggacccccattacacccgctgttgcaacagagttgagggtgggggtactgcatggctgtgatgcctgcaaacctctgacctcccaagctcccgactctaggaacatacagggcttgcctgagtttccacccagagaattggaccagcaggactggagctcctccagatttccagacagccagagcctctgtccctcccaagtctgagtgtcaacctggacagggagactatggcctgatgtcaccaatgcttgtcccctgtcgctgtccccacctgcattccagaccatgggacagaaacaataagctgaggcaggtattgccagagagatggaggcagcccccacctcccctgctggtgctgacgctgatgagacaactctgagaccccagagctgctgctcagctcctttggctacttgagcccatttttccttcccactctaaggaggaagggggagtaaggaagatatgctttggccagtccgtatgagaagaacagcagttgcaattaactggactccgagagcgacagggagggacgggagactgaagcaggtacagtgtcgccacacagggggagaargccacaggcttggttgctgtcggagaaacagcatggaggttcagagcagtcagtttgttcttaatggtcataagtccagggaagggaataaaagagaaaagaaggcaaggggagaaagaagaaagataagccaggtactatagtaggtattttacacatttaaccttatctgagtctcccagccattctgcaagataggcaattgctatagtctgaatgttggagtccccccaaaattcatatgttgaaacttcatgtaatagtagcaagaggtgagccctttggaaggccatgaaggctatgccctcaataatgggatcaagaggccagcatggtggtgattcaagccagtaatcccagcactttgggaggccaaggtgggaagatcccttgaggccaggagtttgagaccagcccgggcatcacagtgagaccctgtctctacaaaaaacgcaaaaattagcctggtgtggtggtgcgtgcctatagtcccagctactcaggaggctgaggtaggaggatcacttaagcccaagaggttgaggctgcagtgagccatgactgcaccactgcactccagtctgggcaacagagcaagatcctgtctcggggaaaaaaataaaaatggaatgggattaatgcccttataaaagaggttgaagagagtgccctagccccttccaccacatgaggactccacaagaggcaccatctatgatgcagagagcaggtcctcaccagacactgaatctgctagcacgttgatcttgaacttcttggtctccagaaccgtaagaaataaacttttgttatttataaatgaccctgtctaatgtattttgttgtagcagctcaaacgaactaagacagtaaccattcactgattcatttttcttttttttttttttttttgagacggagtctctctctggtctcccagactggagtgcagtggcgccatctcagctcactgcaagctctgcctcccgggttcaccccattctcctaactcagcctcctgagtagctgggactacaggagcccaccaccacgacctgctaattttttgtatttttagtagagacagggtttcaccttgttagccaggatggtctcgatttcctgacctcatgatccacctgcctcggcctcccaaagtgctcggattacaggcgtgagccactgcgcccagcccactgattcatttgtaaataaatgtgaattgagggccaggtgtatgccaagcactgttctcgggggtagggatatggtcaggcaggcaagttctctgctatcttggaatgtgtcctccacctacagagaaagaaactgaggcccagaaaggaggccaaggtccccctgttagtgactgaggcaccagaggttgggatttaaaccaaggcttgtataacatcaagtcatctaatctctctgctcagccgcatgaccttaggcttggccatgtttacagaggttccagtgatgactgagtgcttcactggggtgaggtcaacaaagggatacatgggaatcccacccccagaagcatggggtaagagaaagccatcagcattcctagagctttcatttagcaaacgtctgtccggggccagacgccgtgctggaggtttcacggttcttggttgaacattttcttttcttttcttttctattctttttttttttcttttctttttgagacaaagtttcactcctgtcacccaggctggagtgcaatggcgccatctcagctcactgcaacgtccacctcctgggttcaagcaattctcctgcctcagcctcccaagcagctgggattacaggcgcgcccccaccacacccagctaatttttgtatttttagtagagacggggtttcaccatgttggccaggctggtcacgaactcctgacctcaggtgatccacccgcctcggcctcccaaagtgatgggattacaggtgtgagccaccatgcccagcctgattgaacattttcaatgagacagctaagtggaaattgttgtcttcaactgtacagataatcaaaccacactggctgagtgccttccccaaggtcatccagctaataagtggtgggactgaattgaaagcctaagccggtttgactccaggatgcaccctgtctctccagtgcaccttcattcatctccccagattgccttgggaggacggggctagaggacctgtttaaatgactgtctcctgctcagttggaagctcaaagccctctttgctgttcgtacggattcactcacactcatccctcacagcaaatgtatgaagatgagtcttggaaagcccttgttcgattgggtcaatagaagatgggagagaaatgttctctcccaaaagatgctgtaagagagagccacagaagagcttagaaaggggttttcaaatagggcaggggattcagattttgcctgcaaagttcacttgtgctctctctctccttctctcgagtgaggagtccctgaggcaccagcaagagtgacaggtgtagtgtgggtggccacctgaggtcgcaggaaggggtgagggagggaagctgtgctctctggctaggggccggtacagccttcccctcaccggctcatcctctgagactcgacccaggtgcaccttcc

SEQ ID NO: 8706 - DNA, 17744 bp, Homo sapiens
atttgtgattaactcaatacccagcccctctcccctccccaaaggttaggagacgtggctgaaagttctaagcttctaatcaaggcttggtcctctggagaccagtccttatcctgaagctattgagaggcccctagccgcaagccatctcatcagtattcaaaagacactctcatcattaatatatatttccctttataccacagttatctaagagaatgtatcaactcacagagatttttctggttgtctttcttattgtttagttctaattgtaactctgatcaagaacattgtcttgaaagaatctctaggcaagtattcttttcctcagttgggtgcctttataagagcttaccttggagtagacacgtagaggccagttaaggggacctctaagcacaatttccactctacccagttctcaagcacaagcagtgaacttttgcagctaatgctctagtaaagaaaatccctcctggctgggtgcagtggtcacgcctgtaatcccagcactttgggaggccaaggtaggtggatcacctgaagtcgggagttcgagaccagcctgaccaacatggagaaaccccgcctctactaaaaatacaaaattagctgggcatggtggtgcttgcctgtagtcccagccactcaggaggctgagacaggagaatggcatgaacccaggaggcagatgttgcatgagccgagatcgcgccattgcactccagcctgggcaacaagagcgaaactgtgtctcaaaaaaaaaaaaaaaaagaaaagaaaaaaagaaaatctcacctaatagtaatataaaacactttctaaatctgagaagtaatacatttaattaccagattgctaaaaattagagctggaagggaacctgagaagtggatagaccaatataataattttacagatgaggacatggtggcttggtcaagagacatcgactgtactcaaatgttgtgttatagttctggtggacagaggacaagagacttgagactgatgaagctttcttctgagcctatcatataaaatatgatcttgtgtaaaataccatgccattcttttgctatgaaactactatttaagccctggattccttgaccaaagatttgcagcttctctgacatcagagggcagcaggaggttgaggggtcaagctggaagagacagagcaggaaggcccagtgtatcaacttagcattggcaagaggcacaggggctaggccctactgctcaagttatgatctggattgttcatgcttttggattctctgaagagaagactactgtctgtctggtatgaagaaaggcacaaaaggactttttaagcagagctaatccttgaaaactgtgcttatttcaaactgtcttrtctgtggagcctggaggacaaagcatcccaacccccgcaaagtcactcacccattctcttaattctccataaactcacggaaagatcttcaggaaacatagagaattgagttatttaaagagatttgaaagcactcacatacaagaacaaagccaggtgatttttcttcccagaacaaaatttggcaaaatggcatgaccaagcagatgcttcctggtggagaagaggaagccttcaaatagacacacttaagtgaaaccaggaagagaaagaatggacgagggtggtggggaaggagagaaagtgatgaaggaagagaaacagccacagaattggtggatttctggggtgtgacaatgacacacccaatccatcgacgggtggtgccagatctactggagtgggctcttagtcatgttattattgcaaaaccttttttctcttccaagtagttgaccctggcggggcctagagcagccaccagcaggaagctggcccaaacaatgattccctacaggaaggtccccggttgactcttgcctgacctttctgccctcttcccaaacaacatttcctcttactgccaagccccgctctccgccaccacacactgagaatcactaacccagaagtggagcataaagattcagaaaacaaaacacaacacatagtaaagaacaaaagtaatcagtgatccaagttgttcatgaagaaaatcaggccatgttagtttttattaattcaaggaatatttattgtctatctactatctgtcattgcaaaggcattgcaaagagactgttcacacatcaaatttatactttccaatgtgtccaaaagaaagaaaattgctatattaaagagatgtctgtgctcccatgtttattacagcactactgacaagatttagaagcaacctaagcatccatcaacagtagaatggataaagaaaaagtggcacaggtcaggcgcggtggctcatgcctgtaatcccagcactttgggaagccaaggagggcggatcacgaggtcaggagttcaagatcagcctggccaacatggtgaaaccctgtctctactgaaaatatgaaaattagctggtcatggtggtgggtgcctgtaatcccagctactcgggaggctgaggcaggagaatcgcttgaacacaggaggtggaggttgcagtgagccgagatcgcgccattgcactcaagtctgggtgacgagagtgaaacctgtcttaaaaaaaaaaaaaagtggcacatatacacaacggagtactattcagtcatgaaaagaatgagatcttgtcatttgcaacaacgtggatgaaactggaggtcattatgttaagtgaaatacgccaagcacaaaaagacaaactttgtgtattctcacttacttgtgggagctaaaaattcaaacaattgaactcatgaagatagagagtagaatgatggttatcagaggctgggaagggaaacgggggagtaggggaaaagtgaggacgcttgatgggtaccaaaaatagttagaaaaatgaataagacctagtgtttcatagtataacagagtgactatagtcaataataatttacttgtataatttataataactaaaaaatagtataattggaatgtttgtaacacaaaggataagtgctggaggtgatgggtaccccatttaccctgatgggatatgtacacctatatcaaaatatcttatgtaccccataaatctatatacctactatgcacccacaaaagttaaaagttaaaatttttttaaatgtatattttcccttcttttttactgtctgccacagaaagttttgtcaacattcaacaaatactctaaacccagcaacttcccttaactactctgatgtgatgcttctatttgaaaaacacaaaacagtatattttcttgaatgaacagaagatagaatacccaagttctgttctcaattctgtaaagattcatcaggagccatatgccatgcatttcagtatttggttttcctactagtctaaaaacctgcaatatgttaatctgaaaaatatttaaatactaataatctatcccccacacacacaaaaaaaaattgatggttactatctgcaaatcattctgcacttattattaaaatcatattctataaggaaatatagcttttatatgtttctttacaggtagaaataaacttctaatcacaaactattcaaaatttgaactgggagcccagacacctaagattcagtctgtctctctctctctgtcttttttttttttttttttttgagatggagtctcgcactgtcgcccaggctggagtgcagtggcacaatctctgctcactgtaagctccacccaccgggttcaagcaattctcctgcttcagcctccgaaggagctgggatttaaacgtgctttcagccaaatgcaagtctttatgaaaattgaaagattacatttcatagttttaaaagggagaaacactctgtgactgttcctcccattgccagcatttgcataccatttaatcattagggtttagttttctttggtttcacagctttagggatgggcgaggcaggatgaccaacacattatgtgtggtgcattttttagctactttagaagggcgttataaaaattactcccagcttaacaatttaaaattttgtacaccatgtaccccttggagatatgtcaccctaaatatgaagaagagtaacatcatactcctgtgaaaacagtacaggtagatcataaaagccacataagagctacatagtaaagtgaatgattacctatttaatcatgtgtcccaataaaatgcaatttaaggaaaaatttaaagcagaacattgtttaacaaataattgaatataaagattaaggtgtgaacatagtttaacagagactggcaaaagaaggaagaaattcttaaataaacaraagtcagctacttaagtttaaagctaaggaggatacaaactatttctggaagcacctgttttttaagactttttaaaaattgtggtaaaatacatataacataaacttatcatcttcatcatttataagtttacagttcagtagtcttaagtgtactgacattgttgtgcaaccaatctcccaaactcttttcttttttttttttttagacgagtctcactctgtctctgaggctggagtccagtggcacaatcttggctcactgcaacctctgcctcccgggttcaagcaattctctgcctcagcctcccaagtagctaggatttcaggcgcctgccaccatgcctggctaattttttgtatttttagtagagacgggatttcaccatcttggccaggctggtctcgaactcctgacctcaggtgatccacctgcctcggcctcccaaagagctgggattacaggtgtgagccaccacgcctggccccaaactcttttcatattgcaaaattaaaattctatgcccagtaagcaacaactgtctatccccaacccttcggccactggcaactaccattctactttctgtctctgtgaatttgactactctaggcacctcatagtactggaattatacagtatctgtctttcaaaaagacactattaaaccggtgaagtgactagaagacatgaatggaaacagtctaaaatacaaagggacaaaaagccatgaagcacaaagggagctcaggagggttcagaatctataaaataactccaattgtaacactagttatcagaagtagatacaaatcctcttttatctttaaaacgaaggcaggagatatctgcatcatctcttcatttcttgaaatttgactcaaaaaggaagttgctgtctttatatcagactagaattcaaccagaaagaaaatcgtattaaaacaatctgcctaaaagcttttcaatctttcttagacattagctacttgaataaacatgttgctgagatgtaataatacttacctagaaaactattatttatgtttttcttatgaactataaaacataattgttacaaattatatgcttttttgtatattatacaaaatacaaaaaaagaaagcaataacttaaaatcacaaacttcaacaaccttaaaaaacacgctgattgaaataatcaaagagatggatgcttaatcaaatctgaaattattgctgatgtgaaagctaatttcaacttttgagaacaatatgaacaaaaaagttacatgattgatgggaaatttttattctcatcatattaagtattttaattacatttgttaacctggagatattctctgcaaatgtgaaatcatgaagcaaatttaatagaactacacttccagagaaaagttaccaatcatcaaaacctctgaaagattaaaactgtaattctgaaaatttttttgttttgctccactttattctttttttattgatatagtaaatgtcccagggctctgacctagcttcagagaagtgttcaagaaacagaaattatccaattacggattaccaaaactgtaacagggattaagaagtgacagagaaaaggaacaccctcgaagtgtgtatataaaggccaaaaaggcagccttgaatacactcttcgtcatcacctctcctattcgcctggacaagctcatgtttgcaggagcaccatgtcttgctcgtctcgygcctcctcctccagggctggaggcagcagctcagccagggtgtctgctggtggaagcagcttcagcagtggaagcagatgtggtctggggggcagctcggcccagggcttccgaggaggagccagcagctgcagcctgagtggggggtctagcggtgcttttgggggcagctttggagggggctttggtagctgctcagtagggggtggttttgggggagcttcaggctctgggacaggatttggtgggggttctagctttggyggggtctctggatttggcaggggttctggattctgtgggagttctagattcagcagtggtgctactggaggcttctacagctatggtggtggtatgggaggtggtgttggcgatggggggcttttctctggaggggaaaagcaaaccatgcagaacctcaatgaccgcttggccaattacctagacaaggtcagagccctggaggaggctaacactgatctggagaacaaaatcaaggagtggtatgacaaatatgggcctgggtctggagacggtggatcgggaagagattatagcaaatactattcaataattgaagatctcagaarccaggtgagactatctgtgcctgagtttctattatttgtggatctttcacttcttttcagatcatgtactataatgaaaattttaagaaattatttgaaaacatatttgcttgttacatatgcaaagtgggacctgatgtgtcttaattattatagtaccttatgtgatgtccratcacattaattttctgtttccatctcagtttcagtatttctacataacagtaaaacttatacaacaccaggcagctaattatcatttatatataagaatggtggcagtgagtcaacattagtttaatctaattatttatgatgaattctgacagactgacacattttattgtcttacaagatttaaatattctttagtattatttttcttcccagaaaatctggtgcaaacattacataagaatgtagtagaatctaaaatgtttagccacttttgtatgggaaatatatttttaaagacttttttggaagtgaaatacaatttttgcactattttctgaaaaagctcatgagataatgatctaacaaagtagcagaaatatgcagaggactatgtcctgtaaaacaggttcctgtgcctagtccaataaatgtgcagactgttatctttttgcagaaagatgtagtcctaaatataccagccccagatatacaggtctggggctgtatacttagtcattactaagtaagtttgcaaagcaagtcacctttaaaagctaatagcacaggccgggcacggtggctcacacctgtaatcccagcactttaggaggctgaggygggcaaatcacttgaggtcaggaatttgagattagcctggccaacatggtgaaaccccgtgtctactaaaaacacacacacaaaaaamattagccgggcatagtggcacgcccctgtaatcccagctactcaggaggctgaggctcaagaatcgcttaaacatgggaggcggaggttgcagtgagctgagatcttgccactgcactccagcctgggcgacagagcgagactctgtctctacacacacamaaaaaaaagagctaataacacaggcaacagctacccttacaagwaggcatgcagacacaaggtaaaaatcattcgtgattcactcactattaacatcttttttagatcattgctgccactgttgaaaatgctgggatcattttgcacattgacaatgccagattggctgctgatgacttcagactgaagtaagaaacataaagacttgaaaacaagtgttacgggagaaaaataaattttattccattttataaataaatawatatatatatatatatatatatatatatatatatatatactagaggatcatgacctaaatttacaaacatcccaagggtaaactttagaccattagacaaatctccactgatgctggggcaggtagatcctctctgctgagcacctaagccagtagctacacaccggccgcttctgctcctttcatcagcctacaacagctgcaaaagaaaaaagaaaaagaaaaaagaaagaggcaaatttagaatgagaattttattattaaaaatgttagacatgattagaattaacattacattggtatttttctttacaagggaaaatttcycaagagaaaacttaataacctttatttattaaaatgcccacaagtgagaactttttcaatatgtaagaatggaaggtaccctttgaaacacggccaggtgagctcacagtattttttgccttactgctgccccttccaggtatgagaacgagctgtgtctccggcagagcgtggaggctgacatcaatggcctgcggaaagtcctggatgacctgactatgacccgctctgacctggagatkcagattgagagtttcaccgaggagctagcctacctgaggaagaaccacgaggaggtaggaacatgttctacataaacgaataactctagctaacatatttctccccatatgcattctatacaaataaaattggctgggtgcagtggctcatgcctttagtctcagctactctggmggccgaggcagggggatcccttgaacccaggagttggaggccacagtgagctatgatcatgccactggattccagcctgarcaacagagagatactgtgtctctaaaaaagtaaaataggcctggcacggtggcttatgcctgtaatctcagcactctgggaggccaaggcaggcagatcatgasatcaggatttcgagaccagcctgaccaacatggtgaaaccccctctctactaaaaatacaaaaataaacagggcatgatggcgcacacctgttgcacctgtaatcccagctactcaggaggctgaggcaggagaatcacttgaactggggaggcggagtttgcagtgagccgagatcaagccactgcactccagcctgggygacagagtgagactccatctcaaaaagaaaaaaaaagaaaaaaaggtaaaataaactcatttttatctaagtgaatttcccacatactatgaccaggaaacaaaagtaatcatgagtaaattatacctagatttgattttttttttttcctttcagtgtcctactttcaaattgttgttgtctaggcacattttcggaagtcatcrcttttctgtttgcatcrcgatagtcttttttccttcatgctaggaaatgaagaatatgcaaggaagctctggaggggaggtgaccgtagaaatgaatgctgcgccagggaccgacctgaccaaattactgaatgacatgagggcgcagtacgaggagctggctgagcaaaaccgccgagaggctgaggagcggttcaacaagcaggtagatcctctctgctgagcacctaagccagtagccacacacaagccgcttctgctcctttcatcagcctacaacagctgcattatgtttgtatttagagcgcatcactacaagcacaaatctccactgatgctggggcagccacttctgccaagaatgagataacagaactaaaaygtaccctgcaagccctggaaattgagcttcagtcccaactggccatggtatgtgcaaatagcttttcacattttccaacagggagttaagcaaatgcagttttctttctttgccaagaggttcactaggcacataaaaaaggcagtgttaaggagaactgcattatgaytatagaaagcattaaaagttaaagataatgtactctattttgcataaaagatttagtttaaaaagaagtgycaaccaaaattaaagaagcaatgatataacaatataggttatatggcgaaggtgcacttctagtgccacataaaattgcatttttaaaaaatcatccaatgatttattttcatcatgaattttttatttgctttttctcttagaaaagctccctggagggaaccctggctgacacagaagctggctacgtggctcagctgtcagaaattcaaacgcagatcagtgccctggaggaggagatctrccagatcyggggtgagactaaatgccagaacgcagagtacragcaattgctggacatcaagacacgcctggaggtggagatcgagacctaccgccgcctgctcgatggagagggagggtaaaccaaagtcatgaacaaactaaaatgcataccttagtgaatttattttataaaaccaaaatgggactcagggcttagacttgtatatatagagagtaataaagtaacagacacaggctgcgtgcagtggctcargcctgtaatcccagcactttgggaggctgaggtgggagaatcacgtgagcccaggagttcaagaccagcttgagcaacatagcaaaaccccttcctcttcaaaaaataatttttaaaaaattagctggaggctgggcacagtggctcatgcctgtaatcccggcactttgggaggccaaggcaggcagatcacgtgaggtcaggagttcgagaccagcctggccaacatggtgaaatcctgtctctactaaaaatacaaaaattagccaggcgtggtggcacacacctgtagtcccagctactcaggggactgaggcgggaagatcacttgagcycaggaggctgaggctgcagtgagctgtaatcatgccactrtactccagcctgggtgatagaacgagaccttgtctcaaaaaaaaaaaaaaaaaaattagctgggcatggtggtgcacacctataatcccagatactggggaggctgagacaggaggatcacttgagcccaggagtgcaaggttgaacaaaaaagcarcagacacaatccaattaaaacacataaacacatccaaaacttcatcatgaagaatccccggggcggaggctttctcctgcctttgcaaactgcaaaggaaaacataattctttttttctccagtggttctagttttgcagaatttggtggtagaaactcaggatctgtaaacatgggatccagggatctggtatctggtgactcaagatctggaagctgttctggtcaaggacgaggtagactttttttaatattgataatagttctgtaatttaaaagtgaagacatactttgcttgtcataytaaaagrgtccgctattttttacataatcttacccagacagaacacgttgaatgcatgtgattgaatttctcttgctctgtgtttctgtgagagtttccagactgacattgcaatcccatgattttcagattcaagcaagactagagtgactaagacyatcgtagaggagttggtggatggcaaggttgtctcgtctcaagtcagcagtatttctgaggtgaaagttaaataaggaacttccagatcaacaaaagtgtctttcaaagaaaaaaaaatcaagaaggacacaagcgaagaaatggcatcaatctaggyatctttctggataatttcaggaaaagcttcagtcyagaaatggatgactagccaayttttctgcatcttcttatttcctcattagaatgctcttgaaatagctgaattaacaactttgctttaattgtttctatgcttcaataaatttacttttgcaagttaattattacttatttttttaaaaagtattttacctaggaaggaagctatcaagtatgatctagctgcatgactatattactaatgtcagttcattctttatatcttactgttgtaactgagcgagttatagagaaatgacacactctgagactaattcaggagtccttttattgccggcgaacaagacggctagagctcaaaattctctcggccccgaagaaggggctagatttctttttatatcgtggtctaaataggggagagggagtttagctgaagcaatttttacagaagcagaacaggcaaaccaattaagaaagattaattggttacagaaacagttacagaaaagtaaacagttccaggtgcaggggctcaaactatcacaaagagataatgcaggggctttgggtgccatcccccaagcgcgtcctcaggaactgctgatttagcttgcctcgatatctcatcagtaagcgcattcctggatgtgctcggagtcagcttgcactacttatgcctttaagggaggggagctgcaagtgaagaaacaaaaatggagtctgtccggctctctcagctaagagagacaatcaggttaaaacgaggtagggtatcacattaccttctttatacaattcagattatagtcatttttttaatgtgggcatttttaatggcatcacataagaactcagtggcatgatagctgaaattagactaccgtgtcaacggcttagcccacaaagaaggatgtgattattttaataatcaacttataattaatgtctagtttatatatgtccatcactgaactcgatattttataagataaaaaagaaactcaaaatctccctcctacttcaaaaagctcacatttcagcagagaagaagagctaaaacacaaagaagacagcaagcaataaaaagctgttaatagtaaagacttgatttcacaatctgcatcagaagtgacataggaatcagacatgtgtgtttacaggacatttaggacaggggccaaaaaagagtcttgggaaataagattggctatgtgatatggcaatctgatttcctgaaaccttgaaagccccaaagagaagagatcctcaggcacttgttcccctgccaaatctagccacatctttagccaaaacctgccacttcgccaagctggtgtttcttttccccagtctccactgctaagatctttcatcccgttggtggtcatagccctattctttcatttctacagtatccctgaggccacatggctttgtcttgtcttgtttgggatgatgaaacctgttaagattgggtaggaggtggtacgggccccaggaagaaccaggcatagcaccaacccaggctggctaagggctttctcaatcaaggaatttaatatgcccatatcacaaattagagaatcaactctacaagccagtcctcaaggaaagaacacgggacgtggcataaaaagccaaatgtaaagttataaaaggacaaatctgaacatgtatcttccaatataaaaccaattaagaattgtgtgagcatatcaaacctatcatcaaaacatgtagtttttcatcttctgggcacattgaataaaacttaaaatgaacctctgggtacattatgacttctgcttaaatagctaaccacagaataaggttaatagctaaccacagaataaacattaaaccactactcaaagaaaaagagcaatgttaagttgcttaagtcaaagctgttttccaccatcaaatcattacaataaataaaaccctgaatgcttcttctctgctgaaatactaaaagtctgaaccagctcatccaactggattcatagctcaagagcagaaatggaaatctgccgtaagcagcctgcagaacctaagccatcccggccacatcagcgaagcctctctctgtgggtcttctcaagtctaaccttctagctgtggattttggccacctgagacctatgttcatggctagtactattttcatgtcaaggcaaaagtataaggctactctgaaagtcatctcgaggtgaaaaccctcatctgttcttccttgtcatgcgttaagatgctgcgtttgtactgaatgattgtttacaaatatagaaaaggcccaatcatagacaccagaacactgagacacaatagaatgtgttgttaagggcatgttcaattttgaaaactgaaactattcaaccattttggatcataaaacgtatttacagtgctgaataaaaagttaaggacacggtgttcatacattattacttgccttaaaattattttaaaactctacaataggaatatgtttattgtgagaccctaaagttcagctctccaggcaatttttttgctttgttttgttacagggtctcgctctgttgcccaggctggagtgtagtggtgccatctcgattcacctgcagcctcaacttcctgggctcaagcaatcctcccacctcagcctcctgagtagctgcaggcaaccatgcccagctaattttgtttattttttgtagagatggagtttcactatgttgcccaggctggtctcaaactcctgggctcaagcaatcctcccacctcggccttccaaagggctggggttataggcatgaacgactgcattcagcctcaacttttgaatgagaggaacacatttcttttttctaagagtggatttactgtaagaagggagagctcatgcccacatgcacatgggctttcttttttgtttgtttgttttttttgagacagagtctctcgcttgtcgcccaggctggagtgcagcggcgcgatctcgcctccacctcccaggttcaagcgattctcctgcctcagcctcctgagtagctgggattacaggcacgcgccaccaagcccagctaatttttgtatttttagtagagacggggtttcaccatgttggccaggctggtctcgaactcctgaccttgggatccgcccacctcggcctcccaaagtgctgggattacaggcgtgagccaccgcacccagcctcgcacatgggttttcacccgttgacttttaatccagagattcacagggttgttttttctttctcacctcagggaagtatacacaagaatgatgagaatggtcgacgtggcatccatcctcacagagatgacaaacaagaaacaaggttcacagcaggcagctcagagtaaacggctaaagtatttgaagctctaaggaaagtggcctaaactggcttgacgacttcgtggaattagacagtgttcacccaggaggagacaaactggtgaatataaatcacccaaaatgaagctcaagtaatattatccacacaacctcctcaaggaacaaaatactacaagtaataaaccactttaaaaacttttcagtggctgagatatgacacttgggtaacagaaaatattgatcaagcccttctgaaaacaaagtactcatttgtaatatcaatgtcaatatgaaatgataatgcaggaaagaagcaaatgttaatagttcaaccacttttttaaaagttagcacttaaatagcaggtaagggacaagcccagaggtatcctgtgtacaaagcttggacttccagagagggggcatgatgaagttattttgctgacagaaccacaaggaacatgaagcttataacatgtgctttgttataagcacatgcgagcttataacaaaattgcgataggatgtgcattgcatgcctcagtcacccaggctggagtgcagtggtgcaatcacagctcactgctgcctagacctcctgagctcaagcgatcctcccacctcagccccctgagtagctgggactacaggtgtgctccaccatgcccagctaatttttgtattttttgtagagatggggttttgctgggattacgggagtggctcacacctgtaatctcagcactttgggaggctgaggcgggaggatcacttgagcccaggagtttgagaccagcctgagcaacatagtaggatcctatctctacaaaaaaatacaaaaattagctggtactggtggcatgtgcctgtagtcccagctactcaggaggctaaggcaggagaatcgcttgagcccaggaggttgaggctgctatgagctgtgatggcaccactgcactccagcctgggtgacagagtgagacctggtctcaaaaagaaaaaaaaaaattagagaaagtgtagctctatgtggttccacctgtgatgtaaaagcattacaataaattaatgtctataattaacctatgtagatgtttctataataagtgatgtcgagcagaataactttttgagcaatccaaaggagaaaaaacaggagggcaaaaggaatttatatttcataagcacgtgttatgtatataaacactttgtatctatgtttacattttatttcacttaatccacaaactctctgatgtaggtattactgttcccattttatagatgaagaaaataaagctgggagaggtcatttatttaaaggcctctccctttaaataaagtggaaaaattacaagttaaagctccatctcctaattccatgagctagaattctactctaccaaaataagtgaagttctgtagtttcatatcctagactcaccaagtggcctatttctgtgagaggtaccccccaaaagtactttttttttttcatttttccaaaactgcttctccctcgcctaaacagggaggcttcaaaatttccagaacagttttctatctatgtagacaggagaaacctgttgacattggagaccagaagaactaaaaaagatacccattggtctgagttcagatataaagcaggctaccacatggccctttggccactaaaactgaagctggatttcaagttaagggcaaaaccaggggaagaccagctttctaagcaggacaggagcatcttgaaatgagcttcataatctcacagtagtagcaactggaggaaactatttcattgaaaaccaattttttaaaaataaaaatagagacagggtctcaatatgttgcccaggctggtctccaactcctggcctgaagtgatcctcctgcctcagcctcccaaagtgccgacattacaggcatgagccaccacgcctggccaaaaaccaactttatatgtgcagaaagtacatatgatatgtaattctaagcaagagccattctaaaatttttataacaataaggtggtgaggtgatcctctgcaaagaattttattaaaaaattaacatatattttgagaaatgtaatcacatttccaagcatcctctctcatccttgaaaaccctctacttgtgcaattcataactgaaatgattaatgcccagaatttactgacctgtggaaagagcttttccataactatcacaacttttgttaattaattctaacactttcatctttagacacactctgcttttagcttgcaggtgtctgtaaataaattgcttcgtatgatctttattaattttaaataaattgcttcatgtgattttttattagtttgactaagaccaagacactagacttttaaatctccatgatgggttttatgcaaatgagggctttgttacaccgattcaagatgaggtaactttgcttgccccactggctgttccacatccaaattttctatgaagattcaatatcattgctttgtgatttctattacaatcatagcaacataaaattcccagaatgttaaagagttgggtggtgacttttattccaacctcccacccagaacagaaattgtccctgaaagattattctaggtcttcagtctgtggctgaaggtccctggagcttggaaagatcatgactttgtaaggcagtccatttcatttaagaacaggtgtaatgttagaaatgtcttcgtttccaaatctgtctccctgtgtaacttccagctctttgattctggtttagccctttagagctat

SEQ ID NO: 8707 - DNA, 20773 bp, Homo sapiens
tgaatgaatgcattatgaaaggaattcttttacatgcgagtttgctgatagtcttagctaattctcatgtgtgtaggtgtcttgcctatctgtcagtcttagccttaaaggaaagagtcccatcacctcacttgcggcctcatcatcatggaccgcatgatgatgcggaatgagaatttttattgtttgtactacttcaaaatcattcagtacgtgatcacctgtcatgtatagggctctttatatttctagtttagtcccttttgttttctctaggaaagatgttttagacctgggacaaaagaagaaagagtgtatgctgacatctaggagggaagcacccacctcccctaagctccatctccctgagcactcatttcccaatgaccataccaggttttggccctagagagtttattacaaaataagaaagagaagtctggggaaggttcactcatcatagaattttggcagttcattgcccaagatgactcgatggtccacaccggcagctgtaatagtgaccaggtagatgacacccccgcttgagccatcccggctcatggccagagcaatagctgcagagggtttcaagttggagagagggagagagaggatggcttagcttcaaaaatctttttactccccctccatccatatgcctactaccactttcacctcaaaactcatcttccaggaaggcatatttagtggtgtgctggtaaatcagtttttttacaaaaaggcttccatatgtggcatctgctgatgtccgtggtgtaaatgctcccgctatgatgaattgcaagttacaaatagctaagcagttcacaaatccttgactatttaacagtccgctctcatgagtggtcccaagccagcctcagcacacctcagcacaccactggttctttttttttttttttttctccagacagggtctctctctgtcacctaggctgcagcgcagtggtgcaatcaccgctcactacagccttgatctccccggctcagatgatctttccacctcagcctcctgagtagctgggactacaggtgtgcaccactatgcccagttcatttttttttttacttttttttattgttttttgtggagacagggtttcaccatcttgcctaggctggcctcaaactcctgggctcaagtaatcctcctgcctcagcctcccaaattgttggcattacaggtgtgagccactgtgcttagcacaccactggttctcacagtgactgtgtatcctcatttgatttactcagaacagccctggtttatccgtattgcccaagaaccccattgagctttgcatttgtcctgccccttttcactcttaaaagtgtaccaggcccggcattaacttaaatggccacccctgtatttctcttcctgttcctcataatctacttccttcccatgtttcaaagccctccccaggtacccttccacttggctggttaccgtctgtggtgaagcgcctgcactcctcgggagacatgcctggcttatatgctgcatccacataaccatagataaaggtgctgccggagccaccaatggcaaaaggctgtcgagtcagcattcctcccagggttccatatacctgggaaagggatcctcaggttaaagaatcatcaagcccttccttcccactgagacattaagtggtctctgcaccctgcaatgaagccctggtatctcatatccccaaagtactatgctttcagaggtagtgtccttggaactcattgctagaatgacataggacttccatcttcctctgcaggagagtggggaagcccagaggagagagtgctttgggagaaactcacctgacctccttcacgttggtcccagccagctaccatgagatgtgcagacaagtcctctcgatatttatagctgatatttctcaccacatttgcagcagccaaaacaagtggaggttcctccagttctatcctgagggaaatattaggaataaaggttgatagaattttaagtctcattctcctatactgttaccatcatccctgctaaacgacccctgaaaactgtaactgcaatagctcaaactgcagcctccctcccacatgtacaggggaaccagagtcccacaccaccaactggtaagaagctttcaattgctcactcttttgctcagccccacccacataactttcttttggctgcaaggaccctgctcttatggggaaaagcagataaggttacttccrtcccaacgaccttgatttctcgtatggtaactgcctgatattatggtgggtcacaatatcaccttcttcctgattatttatatcaggatagtgatttacagcttttaaactgtgttcacatatagaatgtggttctcaaaataaccgtctcatgaggtactatattatctccactttacagatgcagaaactgacagattcaagtgccagcaagagccgaaacaagacttttccatttcccagtgtccagctcctggaacagcacactgtacagggattcatgcaggttgggggagctctagtgggtggggagtcagaactccagagcttcatacccatggagctccagctggtaggcggccatgtcggccacggcttgggcatcagcagctgaaccagagagtgcacagtagatgygctcgtgcagcggggacagcttgtcaaacactcggttcaccaccgcctcgctgtcaggagggagtcaacagtcaccaagttaaaactcaggtttttttttttttttttttttttgagacagtctcactctgtcacccaggctggagtgcagtggatcaatcttgggctcactgcaaacttcgcctccctggttcaagtgattctcctgcctcagcctcccgaatagctgggattacaggcacccaccaccaagcccagctaatgtttgtattttcagtagagacaaggtcccaacatgttggccaggctggtctcaaactcctgacctcaaatatctgcccacctcggcatcccaaagtgctgagattatagatgtgagccactgcacccaaccagaactcaggaatttttgagggtgatcattcaatgtctctcaaatttctttgacaagagaatagcatgaagtttaatgcttggattaaagcaggaggcaaataatcatctcagatattattaatcactgcagatgttaatcaaaattaggcttatttttcaggcttagattttataacaaagcaaaaaatgctaaggtaagaaaaatatgcctcatcaattttctttgctattaacaatcttgagagagttatgttctatggaacataatgtcagtaatattgacctaaccccatatactcattttgcatgtgaggaaattggttaggagtgggagaagagacaaaatagttcaatatatggtaaatgagaaaccaggtatctgcttgacagaatcatctttttgatccctaagcacagatggaaagaagaccctcaaaaatctatctcctgtccccctctcagaccctattcctttactcatccctgtacactactgggacaggtcacatacacattcagaccccagatcctcctccacaaattcagagacccaagcacccaccaaatagcttatcatagtggcttttggggaaggtcaactccattcctccaaggctccagtttgccagtcttttcatgaatgggtaaggaaagtgtgtatttgaggccattagcttctttccaaatgcatacatcttcacttttactcaccctgcagacactcgggaatcagaacccatcacaacgcccccgtcaaactccactgccatgatggtggtctgcagagacacagaatatggaatgtcagggcaagaacagccttgatgccctcatgttagagaagaagaaacattcccagagaggcgaagtgactggctcaaagattacacagtaacaggccagagctgactgtcagtacaggctttttttcccttcatctttccactttctctattgcttcatccggctgcaggggaatgccacagcccagctgtgatacaacacagaaagaactgtgtccctaagttccaacttgcctagtggaatcctctccactgtagagaggtggagatgaggctcctacaggtagaagtgaagcagctccgcaagtgaaaattatctccaacggaagggctcatagtatgtgcagatgtggtgtagacccaacacagagtaattgactatgatcttgggaaacaaggtcagtctatttttttttttttggtccacaatcctccactctcaccccccatttcatcagaagtgagctcttccaatttactgaacattggaaaaaatcgaggagggcagtggttagcatggccaggggcaaggcaggagagaagcagcaaggaacacatacagatggttgaaaataaaagtttcagttatggaatttccgatcaagaggtaaatacatatctcagcagccagggaggtaaatttgtaccaagagataatttgactgagaagtttaagctgacttttccaggtcaagaaaagaatcaagaagaagtgagggaagataaagctacatttattctactattgagttggaaggagccttaaagatcctcggttcaaatgaggaaaccaagtcacagaaaatgcaaacgacttatgcaaagtcacacagagttaatagtagacctgggactaaaattcaggtctaactcttatcccttgtttccacttctacttcctacttgccactgctcatttggcagtgaggggagatttcccaaattataagtggtttcactgtgtctttcttaccaggccgtaagttactctggccccaaaggacgctcctctgagtatgctttccgacggaccgacttatcatgaatagagggtcaaagaacagggttaacttcaagttagaggctattcctctctaacaaagccgcccccaagccacgagtggtggcagtagtccagagcagaagccagccagccagtcttggggctgccatctgccccaggcgcccatcctaagcaaagtccccccagtgggcacatgggagtgggcagggaagacacagggaagggagtaaggcagcatctgggccaaggagaggccttcctgggtcaagctagggaagggcatcactagttaacacagaacgcccattatcagtgcttgggctaagagttgcccagtggcaagtttatcaaaagtctgtgtgatgagttggtccttctcaataagtgcctatatttccttctcccaagtgctgttctacttcacccagggcaccatttcctcatctctttgcaccatccccaaccccctttcttgatttaaccagcccccactgtccgggaccagagtgaaagcgaaagcgctttagagtagcttcccgttgacgcttccagctaagagtcaaagcacccgctttttccaccagcctcgcgtgcctgttcccttcacggacactctagacgacccccctcagaaaagaaatactctatgctcattgcgggttgcaagcgctggctgctacaggcgacctccctgcgctcccgttggtctctgcattcacttctccgcgcgcgcttccagggtcccctggccgctgcatctcctccacccctctgccaaccctcaagcccagacccattaccccggtgtggacttctcccgcccggggtaagtccycggttggtgctcccgcccgcagcatccctgcaaggcaccgctctcctcgccgcctggggcactggtttccaacctgggacagcgcacaacgcgcagccgacagccccgccccttcgcggcgccgccaggaggcgcctgggtgctgcggggctgctttgcgcgcggcgctaacgtgtgtagggcagatctgccccgagacaagtgacgaggcagccccgccctgaggctggggtgggaaaactggtgcaagtggaaaggcaggaggcagggagaggcgagaagggtgtgcgtgatggagaaaattgggcaccagggctgctcccgagattctcagatctgatttccacgcttgctaccaaaatagtctgggcaggccacttttggaagtaggcgttatctagtgagcaggcggccgctttcgatttcgctttcccctaaatggctgagctkctcgccagcgcaggatcagcctgttcctgggactttccgagagccccgccctcgttccctcccccagccgccagtaggggaggactcggcggtacccggagcttcaggccccaccggggcgcggagagtcccagrcccggccgggaccrggacggcgtccgagtgccaatggctagctctaggtgtcccgctccccgcgggtgccgctgcctccccsgagcttctctcgcatggctggggacagtactgctacttctcgccgactgggtgctgctccggaccgcgctgccccgcatattctccctgctggtgcccaccgcgctgccactgctccgggtctgggcggtgggcctgagccgctgggccgtgctctggctgggggcctgcggggtcctcagggcaacggttggctccaagagcgaaaacgcaggtgcccagggctggctggctgctttgaagccattagctgcggcactgggcttggccctgccgggasttgccttgttccgagagctgatctcatggggagcccccgggtccgcggatagcaccaggctactgcactggggaagtcaccctaccgccttcgtygtcagttatgcagcggcactgcccgcagcagccctgtggcacaaactcgggagcctctgggtgcccggcggtcagggcggctctggaaaccctgtgcgtcggcttctaggctgcctgggctcggagacgcgccgcctctcgctgttcctggtcctggtggtcctstcctctcttggtaaggggaacgcagggcaagaggggaggacacaaggggactgggacaggaatcaaaggtaattgtcagtaaggtagagtagcgtgggttctgggaaatgtggagcrggagaaggactcctagcgtgggtcttggaacaccacttcggtgtagaagaaacggcactggactggcgggggccagaggttctgggctccattgctgaccgggtcttgattctttgggccacgccggaagcggggaaatcctttgctctggggccgaagggcggggcatcctcatctctaacaggaggcttttctacttcatgatctccagccttcctaataaaatcctgaaagttctggtagagcaaccacagggtagtgagttccagggcagcctatttaggttcgggattgagacgtcagtgtttcctttctgctgatgccctccaggataatggtgagggggaggaggcgtggtggggccagtctgactgraactgacctacttagacttaatatttgtgcgtgacctctcttctctttctccaggggagatggccattccattctttacgggccgcctcactgactggattctacaagatggctcagccgataccttcactcgaaacttaactctcatgtccattctcaccatagccaggtctgggggctgaaaatggggcaccctgcaaatgagggagttggaagttggggctgctgtccgaaatgcacttatatggggatacctgggaccttcagtctgttccctgaacacaccctgaycccctttttttccgggttctttatagtgcagtgctggagttcktgggtgacrggatctataacaacaccatgggycacgtgcacagccacttgcagggagaggtgtttggggctgtcctgcgccaggagacggagtttttccaacagaaccagacaggtttctcctgaaactctttcrttatacgccaygtactgttcatatcctcatacatctgctttgatctcccccctccccgctctctctctctcacacacacatacacacattgttccttctcattcttgatataccctctccctgtctctctctctctgtctctgtctctctctctctctctcwyacacacacacacacacaattgtttttctcattcttgatatacctcaggagcaaaatattgtcctccttaccttaagaaaaacctagagttttcatctagcattttcttataaatctattcctatgtatccttagatagaaaccatagaatttcaaacctggaaattttgagctcatagagaccarctgcctcatctgacagagaaggaaactgaggccaagaccctaaatgctgaaactgcacagttacatatggctagagacacacttggggttagaaccctggtctcttgagtgctccacagacttcggcatgctttctagcagcactagaagctgtacagttacatatggctagagatagacctggggttagaaccctagtcccagtgagtgctccacagactttggcatgcttcctagcagcaccctcctcctccatctctgttatgtgaccagtttaagctcttcctgcctgtgtgtatagcatgggacatacaggttctctagggaacagaaagctttcaggaaaatggaaattcacatgtgcattaatgactttataattaaaatgaaggtcaggcctttcctctttaacactcatcttccctgcactgagatttgcagacctctggagaaccctaaccttgtttcctgcagcctccttagaaccccatgttgacacccctgaccctggcatcctggctcattkttagttcgtctcatcacttggaacctgtctgattcacctcactctcttctccccaaccctgcaggtaacatcatgtytcgggtaacagaggacacgtccaccctgagtgattctctgagtgagaatctgagcttatttctgtggtacctggtgcgaggcctatgtctcttggggatcatgctctggggatcagtgtccctcaccatggtcaccctgrtcaccctgcctctgcttttccttctgcccaagaaggtgggaaaatggtaccaggtatgttcatggagttggcccgctctacacagaccctcatctyccagacttggcagactcagttcctctcacattgctttcagtccagctttcctggcacccttactgattctccatcttcatggaacaccctgtccctgtggtccatgttcccaggttgctcaacattaacctccatactctctgggtcttcttttctagcttctccccacaatctgtctttaagaatttgatccccaacccgttctgagtcattttcctcttcctygtatttctttagcatccaagggscatagctgtgtctctttctcttttctccttttcctctgtctcttctcacctttaatttccaaataggtaactcaggtattagtgtccctgatggtttgccaacccgtgtgacatctcttgtccatgtatccacagttgctggaagtgcaggtgcgggaatctctggcaaagtccagccaggtggccattgaggytctgtcggccatgcctacagttcgaagctttgccaacgaggagggcgaagcccagaagtttagggaaaagctgcaagaaataaagacactcaaccagaaggaggctgtggcctatgcagtcaactcctggaccactagtgtgagcacctgaagatgaatacccattcccttgtccttaagatgccgtgactccattcccattccyrtgaccctgctcccactcctyctttactgggaaatggttggttcagtattttcgtcctagcaacctgaggctcaatgactctactcagtgtccctagccccctccctctctttaaagatgctaggtggcttcctttcagtatggtacataaaatccacccaaccatgtggattggagagatgcgtgtcttccagtcctagggccttcctttgcctctcaggggaagtgcmgggmgccataaattcttgcacctgggmctgcttcatgctggtaccttgtagatttgttagtgagagtgatgggaatagtggaagccagggatgagggacatctgtgatgcactggaaagagagctacgccagtgatccgaagatcctggcttgatgatgcaatttacttgtcttgtgatcatgacaacaaatttaccttctctgagactgtttcctctttatttatttatttgtttgtttgtttgtttatttttacttattattattatttttgagctggagtctcgctttgtcgcccaggctggagtgcagtggcgcgatctgggctcactgcaagctccgcctcccgggttcacgccgttctcccgcctcagcctcctgagtagctgggactacaggcacccgccaccacgcccggctaattttttttttttttttgtatttttagtagagacgaggtttctccgtgttagccaggatggtctcaatctcctgaccttgtgatccgcccacttcggcctcccaaagtgctggaattgcaggcatgagccactgcgcccgactggttgtttcctcatttttcaaaaatggagtgatataaccttctttataaggctcttcatgtattagctgacatcacatgaatgaaagccttttgtgaagagtaaaaygctccccagacaaggtgatagtggtgatggtggtgaagataactgtgacttgcatgatgtgcattgagtcagactccatggggtctctggttcattctcctgtctgcctattgagcctgccgatgtcacttrggagacagggacttgatatttccttyaggttaatgactryggttctttgtgtcccctccagatttctctacctcagtccctttttttgtggtctctttatagatttcaggtatgctgctgaaagtgggaatcctctacattggtgggcagctggtgaccagtggggctgtaagcagtgggaaccttgtcacatttgttctctaccagatgcagttcacccaggctktggaggtgaggtccctccaccttcactccccagtgtgattccttcctctggcccagcaccatctgtgtgatktccttccattctttacccttcttgcttcacataatgmtggcaagcagactacctcactttcactattcttacctccctctaggtactgctctccatctaccccagagtacagaaggctgtgggctcctcagagaaaatatttgagtacctggaccgcacccctcgctgcccacccagtggtctgttgactcccttacacttggagggccttgtccagttccaagatgtctcctttgcctacccaaaccgcccagatrtcttagtgctacaggtacaacctaccactccctgtattccactggccccaactgcaattctgccatcctaaattttcttcctgccttcagcctgcttactgccaagcatatatcctccctaaccctttaaaggcaatggtaggcatcatctgttccataaatcttccccaaactcaagaacccagtttgggcttccaaagagaatgagagaagaggtttcgaagagagtgctctcacgttccaaggaattgctgcagcaaaatctgtgtcttcggtcttccatctttccttttcctttgtaatttggaatgtgatttttccctttcctggtggtatctgacatcaagtgtgtggcatagtggtgctgggtctctgcccttgtctttgcygcttcttctatctctactccttgggraggcatcacccagaaatctgtgcatgtgggagggtaggagtttctrtatttccctgtttttsttctggggtaagacatcatgctrtgtaacaaggcartgacactctcaaggttagaggccttggtagcctcttatcgtgtgcttctctggcctctaggggctgacattcaccctacgccctggcgaggtgacggcgctggtgggacccaatgggtctgggaagagcacagtggctgccctgctgcagaatctgtaccagcccaccgggggacagctgctgttggatgggaagccccttccccaatatgagcaccgctacctgcacaggcaggtatggaagcaggtggcttgaaggagggcagggagcatcaaatacgaagagcattcttactgagcactctgaaagaggggttagggaatgataagagaccttgggtggagatggtggtgtagtcaggagggaggtagtatgattttgtgacatgttctcartaaagattttgagtcttcratctctagataaccatactcccatgtgycttgttctrtgactcttcatcatatttcatctcaggtggctgcagtgggacaagagccacaggtatttggaagaagtcttcaagaaaatattgcctatggcctgacccagaagccaactatggaggaaatcacagctgctgcagtaaagtctggggcccatagtttcatctctggactccctcagggctatgacacaggtactctctccactcatctcaccacccagccatctttacctttgctgaaaccccagtagtcttgcctttatccttcagttcctccttactcatggacatcaatttgaagttgtaagatcatgctcctatggcttcttcatcctgacatcctcaggattctgttcatcttcccagaatctcccctatccagctacaaccgtcagatcttggtgtgtgtgagtgcgtgaatgcatgagtgtgtctgtgtgcytgtacatgcgtgcayacatgtggctataccgttctcatcttggccctttgctctgcagaggtagrcgaggctgggagccagctgtcagggggtcagcracaggcagtggcgttggcccgagcattgatccggaaaccrtgtgtacttatcctggatgatgccaccagtgccctggatgcaaacagccagttacaggtgaggcagtcatcttcttaatggmtrtatcccacccaatcttgcttcttttatacatcttctgttagttttactaacatcataattatacaaaccagtccttgcagttctcagttcccaaatccagttccattggatgcctccccaaggagtagagatagaagacgaggcaaagacacctagaaycagttaaaagagactatctacaaactacagactgaatttctttctttctttccttttttttttttaagacagtgtctcactcagttgcccaggctggagcgcagtggcacaatcttggctcactgcagcttcaacctgctgggctcaagcgattctcccctcagcctcccgagtagctgggactacaggtgtacaccactatgcctggttgrcttttatatttttagtagagatgggtttcaccatgttgcccaggctggccttgaattcctgagctcaggtaatctgcccccctcagcctcccaaagggctggggttataggtgtgagccactgcgcccagtcctatagactgaatttctaaagcgaaacataaggaaaagaccatcctcataatatcgtttatttaaaaaaattattttttgtacagacagcgtcccgctatgttgcccaggctggccttgaactcctgggcccaagtgatcctccctccttgacctcccaaagtgctaggattataggcatgagccacygggcccagcccatcctaatcatattaatattaattaagctagtctgtttacatgcactgtcactcatttattcattaggaatccttctgagctaggcatttatcatcattctacagatgacaaaatggaggttaaaagaggttgaataagctgctcatatagaggtcatatagcttttgagtggcgcagccttgacccaaattcaggtctgcctgacttgaatgctcatctctttactactaagttatatttccttaaaatckaatataaaaatkccaagtccatgggtagagaagaggactattcaatagtctttattcttctgtcacgtgtttcaccctagggttctcatttttatcctacttttgcacccttcatgtaaaacagtccttaatgaaacaaagggtttgcggagaagtactcagaatgggaaacgttggtgtccttggggttgttagcagagccagcagtgatcctgtgaggtcagtcccagccctggaaacacaggtgtctccctgggctgagggtagtccccggctctgacggtccgatgtctttcctcaggtggagcagctcctgtacgaaagccctgagcggtaytcccgctcagtgcttctcatcacccagcacctcagcctggtggagcaggctgaccacatcctctttctggaaggaggcgctatccgggaggggggaacccaccagcagctcatggagaaaaaggggtgctactgggccatggtgcaggctcctgcagatgctccagaatgaaagccttctcagacctgcgcactccatctccctcccttttcttctctctgtggtggagaaccacagctgcagagtakgcagctgcctccaggatgagttacttgaaatttgccttgagtgtgttacctcctttccaagctcytcgtgataatgcagacttcctggagtacaaacacaggatttgtaattccttastgtaacggagtttagagccagggctgatgctttggtgtggccagcactctgaaactgagaaatgttcagaatgtacggaaagatgatcagctattttcaacataactgaaggcatatgctggcccataaacaccctgtaggttcttgatatttataataaaattggtgttttgtactgtggtttcttatgtttccggcacaccaaacggcccactgccttttgcagcgcacttttcagctgcggatgtctcctcttttatcatcctcaatgttttaccccctaactgcatcaccttttcccttaagctttttaattcctatgaggccccttccacttcccctatccccttaggcccacccccaagaatgtgcaagaccccagccacagggcccatcagggcactagcggccgcagctcagagccgtggcctctccgaagtggcagatggggcgggcgcggccagagcaagtgccaggcgggaacagagggactgggcgcgcctcacaactcaccacctcgcccgctggtccttcctggctcgcctggctctgaagctgcacctggaggggaaacctcararcagtaggcgggattgcctagtaaatatctcccattcagggaggcccaggtcrtgtgacgtcgacagttgctgggtagatgaggccaacacaggttgcaagaagaggcggggtttagaggcgtgaaactccgcagtgctcagccaagcagggagcaacgctaggaagggcgggcagaaagggcacgctcttgtgggtgactacaggttaggagaccgttgaacctggaggggccctaggatggaccccgtggaaagattcagagactgcgccctctccctggcgccgccttcccctacacgcggcgggtatattctgttgcagttggcccaggacctgtttccaagactctgccccctcgcacttccgtccctcctggttttgtaaagtgatgctcataggaacccccaccccgcgtgacactactcccagctcctggctgacttctagtcttctggttgaagctgcgcctttagatgacacgaccctacccacccctgtttccagcggatgcccgggcctggaggtacctcttactgtaacccatcgccaagtgggcttttgaaggcgcctgttcctttctcgctttcttcggaagacccttgacccatcattcccccgacccccataacgggagagcagagaagccggtccccagtgtgatggtcctggtccaggcactaactgtccttttctcggaaaaggcagggggatgtggaaaagagtcttgttccctccccttcgatctgtggctttcgctttcacttcctcctccgagagcggacagatctctgggtgctgggcggtcatggcgctactagatgtatgcggagccccccgagggcagcggccggaatcggctctcccggttgcgggaagcgggcgtcgctcggacccaggacactacagtttctctatgcgatctccagagctcgcyttaccccggggaatgmaggtcggggcagtagggaagcccctagggatgcagggaggcgggcgctgaggagtggagggtcgcctgagaggaggaggcgagagcgggagcgcggggtacagggtcgggggtagccttcagtcccggagagcgccagacccaaagaagaggccacatggggatggggcctgagaggaggaagtgcaagttaggacaaagagttacaggtgaggtgggggctcccaaaggaagacaagagaactttcctgcccttgtccacacacaaatggtggagcctttttcatggggttatcacatgatataggaggtgtgtggtgtcttgggaaacctatgaaatttgcctgctggcctcctctcagcaactcactgttgcgcgacttagaacaagtcacttagtctaggtcccaagcccctcttctgtaaagtgaggatactgttactaaacgtrttttgtgagggttgaatgctttatgcatggaagaaaccctttaagtcactctcaaaattttttagtaatggtaacatgtgcttgctttcatttctgttgtgctggaaaatggaaaaggttgatactggcatgcctcttcttttccttctcccaagccatttccttctagagattggttattaactgtttcatttattgatggttagatcatttctgcatatctcctcaccctcatactccctaaaaccttttcctggagcctcttactacagaatttttcattgcctttctcaacctcttttctcttatcagcccacagaattcttccagtccctgggtggggacggagaaaggaacgttcagattgagatggcccatggraccaccacgctcgccttcaagttccagcatggagtgattgcagcagtggattctcgggcctcagctgggtcctacattagtgagtgtatacgctccagcaggcagaatctggggagctgggctctcctttccacaggaggccaactctgcaacaaagtggaagtggatattgatttaggacacactgggggatctatggggtcatcccttctctcccaaagctccatcttcttccaggtgccttacgggtgaacaaggtgattgagattaacccttacctgcttggcaccatgtctggctgtgcagcagactgtcagtactgggagcgcctgctggccaaggaatgcaggtaagcgaggcctctcatcttcctttcttagcctagtggttaatccctggatctctcagatcattgctccttactcttgtcctatgtggtccatcttagtgctaatagtatatttcacaaaacagctttttggtgataagacccttctcccaaatctcagcctgtgctccactcataagccagatagtacgtcaggtatttagcactgacacatccaccctggcgggacagtatcatttactaggctgcctttgtatgtttcagatactttaaattccaaatctttctctgatctttagatcctacaaaataattcctttccaatgcttatctctttaatcatttcctgccccatcaagttggaaagagctaacctctctttcctcactccaccttgtcctcacccaggctgtactatctgcgaaatggagaacgtatttcagtgtcggcagcctccaagctgctgtccaacatgatgtgccagtaccggggcatgggcctctctatgggcagtatgatctgtggctgggataagaaggtgggtgctctccattcttcatgttcccccaccatgttccctatggatgacagatctgtttcccatcatatactcctactccctccctgacaagatgcatggcatatagagtgcttggttatagaactgtttcagtatatccatggactatttattggcccagatatgaatcattgcatgtgttttgtaagcttgtcccttttgttaaacagttgatttcaagtttgtttttcctttttcatttctaaagttcgatgactttaccaaagtggtttcctaattccaatgttcttgtggtaatattaattcttttgttcactttttatgtctcatatttgaacccccatgttaccaacatcttcctctccaatttcagcctgaaatctttcatcttatagggtcctggactctactacgtggatgaacatgggactcggctctcaggaaatatgttctccacgggtagtgggaacacttatgcctacggggtcatggacagtggctatcggcctaatcttagccctgaagaggcctatgaccttggccgcagggctattgcttatgccactcacagagacagctattctggaggcgttgtcaatagtaagagaccaatgctcccaccaccatgcctgggaggagtcggcgggtggtggggggggtgatttaagattgagaaaccagcctggccaacatggcgaaaccccgtctctactaaaactacaaaaattagccggacgtggtgacgggtgcctgtagtcccagctacttgggaggctgaggcaggagaatcacttgaacctgggaggtggagcttgcagtgagccaagatggcgccactgcattccagtctgggccacagagtgagactccttctcaaaagaaaaaaaagaaaatgattgagagactcaaaggagggagagtagtagggaggaaattttcagagtcagaagaagggcattaaaggcccagtcatatggttttaagcttgcgcatgtgtcttgttgctgccttcaacataacatcagtgacaggaacttgctgaggtgaaaggtgactccatgttcttttctcatttgtccacagtgtaccacatgaaggaagatggttgggtgaaagtagaaagtacagatgtcagtgacctgctgcaccagtaccgggaagccaatcaataatggtggtggtggcagctgggcaggtctcctctgggaggtcttggccgactcagggacctaagccacgttaagtccaaggagaagaagaggcctagcctgagccaaagagagagtacgggctcagcagccagaggaggccggtgaagtgcatcttctgcgtgttctctatttgaacaagcatttcccccagggaagtttctgggtgccccactaagtagaataragaaaaacggttataaatacctctgtcttgtggctgaatggggttgggcctgtggttgttgggtggggcagaaagtaaagagacgctttttctggagaaggggctcagacccctatctaagaaatgtggcctcaccacatagttcttcctggggtttccttccacactcatctctccaagacctcaggaaggctgctcattgctgtccatggacacttgtttgcaatttcacataggttagggtcctttccatagagaggcacctggggactcctgtgtgttccattgttaatggtttgaggaacagggagtagggcacctaggataactgtttttgactttatagagtaggatgaaaaagcttccacttcactttaatatggtaatcatataaacaccataccatttatcccaaataacactttggagatattggatattgaatataaagacagacattaagggtctaatttcatgatgtgtcatgctgaattgcaagatggcaggactataattttagaggaagaagagatcaggaggactcccctaagtgaggagtgtggggaaaatgtaaaagatccaggttagaagaaagagacacacatcatgagattttcggaatcatgctggaactatggaccatgtcactttccagaaaataaaggaaacaaatgcttgaaagtaggagcatgagcttgagcatggagcttttttcattagagagagattcttaaaatgccagaatgaatagagttgtaaaactttagcgagcccctacttaaaatccctcctccccaccaccactattttaaactttaagtgactccttggtagtcacacaggtaacatttcaaaatggtgatctggaatccaagcgacccttcctttggggaatttgtttgtttgtttgtttttagtttgggaggtggtttcaatctgaagagtcctttctggaataaacgaatctttctgttgcataggaaggctctgggtcaggaaggatatttaaaaacctaattactgttctaaacagtgttaaaatagaacaagaaccaaagctcagtacggggcatttccctcataggctgaaggtgcgcccaacataatttggagtacagactcagaggcacctgaacacgcgccagctcaaggtgctccggctgagaaggacggatgaagatgaacgctcagggcctactaaattcaaagtctgtacgtgaaaatcccctttggcctggtgagattggttggaaccttctatttaggagagcccggctcgctcgcctaaaactggagcttgcatggaagagggcactttttttttttttagacgaagtctcactcttgtcgcccaggctggagtgcaatgacccgatctcggctcactgaaacctctgcctcctgagttcaagcgattcccctgcctcagcctcccgagtagctgggattacaggcgtccgccaccacgccctggctaatttttgtatttttagtagagacagggtttcaccatgttggccaggctg

SEQ ID NO: 8708 - DNA, 28786 bp, Homo sapiens
  misc_feature (1)...(28786): n = A,T,C or G, or insertion/deletion polymorphism (see Tables 1-2)
tatgaatataaaaaggaagaaggtaagaggtcaaaggaaggacatatggggaagaagaaggagcaacaccataaaggaaataatacagagcagatgagcagttataaaaagaaaggagcaaagaacaaaatgaaaagtttatcactgataagtcaagctgcttcctggtctttgaaagtctgggcatcctgaccctacacaatagtaatagtaacaatgacagctaacatttgttgagcacttacttgtgccaggcatccttctaaatactttacatatttcactcgctgaattgtcacaataaccctatgaagcaaatacatatcatacattttacaggtaaggaaatgcagggaagttacatattaataacttgctaaggtcatacggctactggcggaactagtagagaggttttctctcccattaagatcttaatttttctatgacacagatgtaaaattgtttttagagtcatgggggtgggggaatggacattttctttttcttattatagaaaaggtagaaaaaaatacaaaattgagaggaagaagaaaatatccttcaaattttagggctcttgacagttttaaagtttctgtcttagtttatgaacatgaaamtgtagaatgtatagctttgttgataatatttttcatttggggcatataaattcaaaagtacagtacagttattttggcatttgttccaaacttttgtttcctttttaaaaatatttcaacatttattttatgttcaggagtacatgtgcaggtttgttgtataggtaaactcatgacttgggggtttagtgtacagattatttcatcacacaggtactaagcattctaaacttttcttacatttatattttgatttttgttttagaggccaactagaaattattgctgagtttggaacacctgtaggatttaatttattttgtttcttagtctttattagtttgtaagaattagcaaagataagaggataaaagcaactattatcatgaaagaaaacgatgaatgtgtatgtgaaagtctgggtttagaatgataaatgcatcagagtgagaaggaactacgggactcttctgctctcacctcccaactcacagatttccctgtgagttttcagccctgacatgtggggacccagtctgtgcttggccacttacagtgacaggagaatgactccttgccactgtaattgtaagtgtctagagggtatgacctgtgtcttatttttcactgagaatgactccctgacacagtaagtggccaagcaaagagtggtatttgaaactaaacaaaacaaatcctataggtatttcactaggaaacttagcttgctcctcagtttaaaggactcaaaggactcatcaggaaaaagagggtaaaataaaaagacacaaagtcctctagcagttattggaaactcatcttcttaatacatgaatgtcccttgtactttttaaaatgctttttaaaaaacactttcacaagttctgcagtccaaagatcagccagctatggaacagattatttttcttcaaaatatcatttccattcagacaaaaatatgtattaaaagactactatatgtcaaacactgttagatgctaaatacccaaataaaaataatacatacgtcctgttctgcagacgcgtataagtcacagaaggaaacacaagtgacaggacaacagcaggttcagaaggataagtgcagatacgtaggtatacacaagatgcgaccaaacagcacatcagggaaggcttcctggggaacagatggcttcaatgtaggcattcagaaaacagggcaaaagccacttctctcagggaagacagcctgaccgggagaagatactgagtttactgtggggctattgcacttagaagacctgaaagtcatctaaggagaaataatacatagatatttgtggattatgggtggtctcaggagaggaatttaggccatagaactgagagtcattagtggcaggtgcaggttaaataagattttccaggaagagtgccaaaaatcagaattgccgagatctcagggtataatgagagaacatgatagttaagaggtggtttaaaagatgataaggaggatccaggtaaacaggagaaaaataaggacagggtagttcatcagaaagaagtggattatagtgcaaatgttattagtaactcaagtcagaggcactgagaagaacccactgaatttgaccttctgtagaggttcctgatggccaagatgagaggatcctcagggatgtaccagagacaagtcagaagcttagctccacgtgtgaggacacaaagaaagtgtctctgggacaggatgcagactgaaggcaaggttgttttttatcagttggtttgcacttatgtttttaaggtaaatgacatgtttaaatgttaagagactgggcagggaagccctgaagagacagctgagctcattaggaatttctaccaagaatactaaaaagtatttgcatctatgaagagaagcctattgtggtgtttattataacataacattagaaataactcaggtgaccgcgaacagggcaatagatacttctggttctacccagcctgacctcctctttattctacacatcttaaataaaactgtctgaagccagtgtgcatcttgtacgttatggattctaaccttccccatcactagattttggaatgacagcatcatgcacaggcttgatgtcattctccctgatttcagctacaggaaaaaggagcattcactacggtccatctctggctgagtccttgcagctatcaaaagtctaggcctcccttgcagtcctgaatctctcagaacccgaatcacaaggctatcaagaccatgcaaccctgctgtcttgagagaggaaagcttgtgaccacccacaaagacccaggaagagccctagggtcctagaagagagggaggatacagaaacactctttgcacttcgtctcctaatgcagagtccatagctcggagttcctgtaaagcagccacaaaagatagaggctggggatcccagagagataggagggccctgatagtaggtcactgtgtgcaggaatctggggaaggcagtgtatgaccctcagagctgggtctggacttcaaacttggctcgttgatctgctgtgtaaccttggaaaacttattcatctttttgagcttcagttttttcaaaataatttctaaataaaaggaataatttctaaatgaatggaatattatcttcattgaagattcctgtgagatgtaaatggggaaagaaactatgcaggagtctcataaattctggctgttattgctgttattattatgagggccagagggaacatagactatgaggaccagatagatcaatgagcccctaaaatctgtgatccctgaagcagcaattgatgtgaaccaccccatcactcaccccracgctcytgcgtcctcctgascactcacccttgatggccccagctcctcggagactcagcaggaaagccaaggagagggctctcaagatcacagctctgatatggaacattctgtcttcwgggcgcatgttgtggggtctataattgatgactgtgagcacaggaacagtgatgaggaactgaggccgagtggaggcagatgagactgaaactgtgggcctctagcactggaaatgggtggagaggaatcagcatggctgggattcacctatcagagaaatcatagagctgacattctctgttgctgggtaaagaggacgctggaaggtgctggggaagagatgggagaattttaggtaccagcgtggtcaagagagctccagttcacagttcattttcagagttagagaaagagatgtaaaaagataagttacaccttcttctgacggcaaatgttttccattatgttccttctcccgagccccacccccatcccagacagtcagatgatctttgatgttttttggtcactatattttaaatcatgttttatgttatgttgtcaatattttacaaaaatattctgctgataattaagaatgaatgtgctatctaataaaatatataattaatctttctttcaggtccacctccctgagatacctcctttttatttaatcatttctgcagaagtgttataatttctatttagaggttttaattaacttgaatgaagttgatctttaattgtttatctattcctggttacctttgttagtgaaatttctagataatttttatttttcagatttcttagtatttgatttttcctggtatttaaacagtgtaataacatttttatctttaaattactagtcttgttatttcattttcatataagaatacccaggacagcattacctgtggtaacaatgtgcgcccatattttgatcttgtttttaagaagggtttctctaatgtttttctgttacaggtaatgttaattttttattttatattctctttaccatatttaagaaatacttttctagtctcattttaaatatttcaattttgagctatttatttgatactcatagagaaggtcacaaaacatttactatttaatgtaatgatgaagtacatatattacgttaatattttatcttatttgtggtagccttaccttgcataaataataattactaacagattaggacatgagagattctgttattagtgctttgcatgcattacctcatttaaacctcatattaaacctgagggaggtattattaatgtctactgtaaaaataaattacctgagacatcgaggaagtatttgtctaattatctatggcaggtaaatgacaaggagaaaagtcccacccaggcagttactaaaaaaactgagtttttctccacaatcctctcctggccccttaatcctactagacaccttctactacataattattttcttctcttgcattttacatgctagccttctatttacattttaatattgatttaaagaaatgatgccaatttgattttttttgaaattagaattggtggtccaacaggatcacatttataagtgtctaaagtaagaagtaatgttctttgaaagtttgtaaaaatattcactctaaacaaaatagaatcagatgctttgaaggaggtggggtctttgatgattttttttcactttcttccttatttaccagtcaatttatattctctatggactttatttttccaaagcaatttcagacctattgatctcatttgatcttaagagctttgctataaggcaggttatatcatccccatattgaagacaaggaatcgaagtccaagagaggcagtgtcgttaaagctgcatatttacatggtagggtaggtggtgtgtccacgctcccagtgtaaggtccctagactgagccctcctgaccctgatgacagtcctgtggaagaacctggtaactcctgcacatcgcaggactcacagacctctgggagaaagtaaatatgaatgggtgctaatcttaaacacacccttggacaaaggcaagacagacagactcagacctcatttgagttctgagatgggtactctaatccctctaagtcatgccactgaatgaccttttacacactaagatagcactttttccacaacagaccatgtcctgtgggtgtgtgaggtgtggcagaattggggaaatgataatccctgtagatgggccagcagaatatttgagatcaccttcagagcaaagaaaacgcataatctccccaaacatcatgacttatctgactggttaaaatgagtatcactgtctttcctccgtcatcttaagtgcatcacaggctttatattttcagacctttcatactaactttctgcctagtgagcaatgactcatacaaagctcagtgtccattggttcttttctcagactctgtccaatcccagggtcacagaagactacttgggttcatggtctctaatatttcaaacaggagctccctttagcgagtccttcttttcctgactgcagctctttycattttgccatccttttccagctccatgatggttctgcaggtttctgcggccccccggacagtggctctgacggcgttactgatggtgctgctcacatctgtggtccagggcagggccactccaggtaagagccgarctgccattcttggagggtctrgctcagggaacaattcctaggggacgttatctttaagggatcaaattctgagacaggctgcgggggctcctgccctaaggcagtgtcctctcttcccagctagagaaagaggttcatcccctataggatagcttgctaccctactggcctattctctctccaaggacatgggtacagtaaacagagagaggtgcccagtggtcagtgcttgtctttggggaaaatgggaccaagaggtccwggataaccttggacagacaaggtttgcasagagagaagttggcaagtgcaggctcctgggcgtgttcayrtctgcatccagcctggaggggactcaggcagagagccctaagctggagtgtccaggctctgaggatcactgaggattcagtgctcacgaagaatgcctcttattccccagggtggagcaggagcccacaycccttggacaattaaggagagaagggagggagggggataggttttagcccctgaaggcattctcattaaaggtacttctcccagcctccccagaacttggttagggtactagagtgggttgcgacttgtaggaagaatgagatgaggttgtgtgggtgcatgacagggattgagtgtaggttatcagacagccaaggaagcagtaaccaagtgaaaaatctcttcttcctgctgcctccctgtggctggtgtaatattatggcatctatgatccattgtttttctctcaggatactctcaggatatttctttttatatatatatatactttaagttctagggtacatgtgcacaacgtgcaggtttgttacatatgtatacatgtgccatgttggtgtgctgcacccattaactcgtcatttacattaggtatatttcctaatgctatccctcccccctccccccaccccacaacaggccccggtgtatgatgttccccttcctgtgtccatgtgttctcattgttcagttcccacctatgagtgagaacatgtggtctttggttttttgtccttgcaatagtttgctgtgaatgatgrtttccagcttcctccatgtccctacaaaggacatgaactcatccttttttatgrctgcacagtattccatggtgtatatgtgtgcattttcttaatccagtctatcactgatggacagttgggttggttccaagtctttgctattgtgaatagtgccgcwataaacatatgtgtgcatgtgtctttatagcagcatgatttataatcctttgggtatatayccagtaatgggatggctgggtcaaatggtatttctagttctagatcyttgaggaattgccacactgtcttgagataccatctcacaccagttaaaatggcgatcattaaaaagtcaggaaacaacaggtgctggagaggatgtggagaaataggaacacttttactctgttggtgggactgtaaactagttcaaccattgtactctcaggacatttctagtccaaatttacaccaacactctgagaggaaggactgcaaagtaggtaccttagttttccactgacttccacytttcctgcttacacccttcctcctagacctctccacacccctcctaggacacacctaraaggtactgacatcatgtcacctcctcatctttcagggtagcaaggttggaatctcctgaatacagcccctcaagccctaaaacctcttatctattacctygggttcattgtccaggaaggggaggagaacttgaacttrtagtcacagaagggtgctgagaactaaccagcaggacggctcagccctgggaactgcagaggggtgaggctggggagagaggaggctggagcagcactggtgacactgaacagtgtcaggaggargtgacggatgcrgcryccccatcccataggcagagctgtcatgtgggatgagggacagtgttgggagycaccaaggaaacccagaggtgggggagcagagagcagaagggrgcatgtgatgctggrcagtgaaagggaggacrggcaaaggctgggttgaggtttgtagggggaatgagatgaggcagtggagccatgtgacagggactgagggtagattactggagctccctgcgtagaatgaatgttcaatcaaaayytgctggagggagagctggagccataggggagtgggtaaagtgggcagggctgattccacaattccctgcatgctcccccaactccacacacatccccaacctcaaacagggcacaagaccaaagggctgaggagccaggctatagcttaaagaggctgggggagaaaagcttggctgagacaacccatagggagctagaggtttttaatatatcctattctgaataagagacgaattcattcagatcagtggtttcaaaccgtgctctgggcaactcaattgctaagggttccacaaacaggataaagtttcttatatacaaaaaaaaatgaaggtttcaaattacaccataaaacccctcattgcttatgtctacttggcaggtaaaattccatttcaaaagttaaatgtacttaaaaaattacctaagactgggtaaattaaaaaaattaaatgttgcaaagaaaaaattcaaaattcttattcttgaatgaaaaacgttctcttactggtgattgaggaggagaaacaaagactaacaaatgaaaatgggagaatccacactcagagtggggcaaytgaacaggcaggggcggatggatggcagaggaggaggaatctggactcaaggagctggggggcyctgggcctggaatttyagggtctggsgcccaasgcaccaggagaagaggcaggtcaggatatctgagtcaagacctgggatcttgccttagcaatgacactggagactaaaggtggactccatggtgcccttgagcccagccctaccccatctccactatcctctgccaccagctgtgcaacttctgcwaggggtgaggttaataaactggagaagttaatttgtggagcatgaaacagatgagcagaacaatcacagcaccttaatttccccagtgtgcccaagaacagagcaggcctgaagayactcaaacagaaacaaacatgtgccgtgtcactgataattctgtgtagacacacacctgccagacactgctcatggcactccctaggaagaacagcatgtgggaaaggctgccaaaattgttcatgtaaaaattacatcaatgctgtcttcctcggtgctgyctatgcagctggcagccatctcttcctccacatcatggcctccctcagactcctcatgaaggataagatcctcaaaaagaggaccaacaagttcatgaggcaccaatcagactgaaatgtcaaaattaagcataactggcggaaacccagaggtcttaacagtagggttcgtagaaggtccaagggccagatcttgatgcccaacattgcttatgggagcaacaacaacaacaaaaaamacatgctgcccagtggcttccagaagtttctggyccacagcctcaaggagctgaaagtgctgctgatgtgcaacaaatcttactgtgctgagatcgctcacaaaatttcctccagaactgcaaagtcatcatggaaagagtcacccagccggccatcagagtcaccaaccccagtaccasggtgcacagctaagaaaatgagtagaaagttcatgtccacgttttgtgtgtaaataaaaccataaaaactgccaaaaaaaattacatsaatgcctctaaacccaaaggactctacccccacaggtccctggttgttgtggtgattttcattgtgtaaaatacttyccacatcttttgacaccaagtctttctgcagccatgtttgaaaattaactttcaggctacagagtctttcttataccaaagttgaagaaagttttaagaaatatatttctacatytcctamatgcaaaacaacaggagcaagttgaggaattctcaagaaactggtcgagaagagagagcgcttagctatggaaaagagaragaaggaagggagggcttcctggaggaggtggcatttgaaccaggactgacatcaggatggaaatgtcagtcagggagttaagtagggggagcagctccgccctccacgtccccagctcctcccgcccctgttttttctcccagtgaccccamgtgaaacgtctccgcctcctccagccaccagcagaagggactgccttcccctcagtgctcgcccctccctagtgatcactcagtgcccctgagctcattcttttcagtaaattctctctctgcrtggtgagaaaacaggcctggagaggctctgcgacccgcttaggaccacagaactcgrtactaggaaaactcctattttaaaatcyagccctgrgtgggwagatttgggaagaatcsttaatattragagagagagggagaaagaggattagatgagagtggcgcctccgctcatgtccgccccctccccgcagagaattacstktwccagnnacggcaggaatgctacgcgtttaatgggacacagcgcttcctggagagatacatctacaaccggsaggagywcgygcgcttcgacagcgacgtgggrgagttccgggcggtgacggagctggggcggcctgmtgmggastactggaacagccagaaggacmtcctggaggagrrgcgggcagtgccggacaggrtrtgcagacacaactacgagctggdcgrgscsrtgaccctgcagcgccgaggtgagtgagggctttgggccggsggtcccagggcagccccgygggcccgtgcccagggcgcaggagcagccgggttggcctaagggaccttagtgccgggcggaaaggggactttgggttggggattcatggggggagcccatctggagcttgtcaggggagcgagcgcggggacctggactgggctgagcatggagtgaggaggacgrgagcagagagaccccsgggacttcatcaggcctggcagctgactgcatgtggggtgaaaaaaggaagccacaggacagcgcacaagggtatggtgtggagatggaggtggagatggcacagcaggccacacagagaagaaacctacagggaggtagctgggtttgaggtgcttgaggggcagatgggtggtctgatgggcaggtagacagaagggtctgcagccggggaggagactgrgatacatgagaccatccagggagagrggacccagggggaagagcaaaggacyggatcctgggaactggacagttgtgatttggccaagacagaaaagcctgtgaaagagaccaawaaaacccaagtgcagtgtgaggagaggcccgcagagaagagtcttggaagctgaggggaggtgacctcagcagcacagtggacagcggtgccagtgacttgggaaggtcagaaaacagaagatggaaagtgggtttggaaaccagggagacctggggagagcaggttggccgcagcggcaggagctggaatgggagggggtgcatgaggctgagtgtggcgcatcctcctcggggctgagatggattttacttgtcttgggttccccacggctgkcacagggcagtgtctsagttcattcrtctttttccttcaggaagtctgggtgtaaagggatggagagaggtgaggtgtgtgcagtaagaggatttctcaaggatgggacaggaaggccttggagctttggcttcctcctgtgaacttgtggggtggggagcctggtgcaccaacctkwgggacytgagggagtagtatcaggatgtgggattgagccctggaccttttttctagaaagaggaaaaaaatgaagggaggaggaggaggaagctggggagatcacacctttgattttcttgttcctggaaagtgaaaggaagttcacctgctatgagtgagaaggtggacacactgggtggggatgaggtgagtgacatgagcttaggaaagttgctgaggtaattggttgagagaggtgttcaaataaaaataacgcaattggcaaaaactgttactaagactttgtagaggcaccaatcagtgacatggcagcattttctttcacagtaatcaactgccagattgcagacagccctgatgccagcctaaggagtgtgggtttctcctccaggcccgcaggtccccaacctcactcctctgaagactcttctggagatcctctgtgatgcacagatctccagactcagtgcccccagactcagattccctgggtrgggaggtckggggatctctgcttgtaatcagctccctagaggttcccatgtagccagataagtattgtcagaacactgaagatttttgaaaaatgaaaaagagaaggttggagatgtgtcttcagaagactactaagggtgctggctagaggagggaccagaggcagggagatgaggtaggaaactgctattatttgtcagggaaattgcaatcaaggcatgagttagaacagggaaaacacagaggcaagggagaggtggaagggggaggaaagaagtagtgacaattccagggtggatgtccacccaaatctagaagtaattgagcaaatgttttctgggcattagagaaggcaactagaacaaacaggaatccttgccttggtgaaatgtatttgaactgggtcagaaatgaggccattgggtatcargccttaactccagcgcmccctggaggtcrctgatgtggctccaggctgacctgctcctgtcaaagaatattgagcaagatgcctctcrtggaatgttctgggaccttaaaacagatacccaagtattccccctgatttcatggttcccagaagctctatggggaagaaattgtaggtaattcacaactgagatttagacataagttgaatagtgtaatggacattgagttaaccgaggtaatgaagtagtgagacacaggtgcccctgaaataaactcacattgagggaagaggctgacaatgtggatcagtctgaaaacaaggcaaaaatacaatagggagtaagggttgtgtgtcagttcaagactgtacttttacctggcccagcgccatgttagggtatttgtgttctccaggaagtagaaaggaaagaactgagtgattagggacctagaagactaatttgagacattcctcttgatgagctgttctctagggtagtcctctgaaagagctgttctctagtggatctccctgaatgaactgttctctaggagcacttgacccttttctgtgtttgttttttgttttgtgtttgtgtttgtttttgagacaggttctcactttgtctcccaggctggagtgctgtggcaccatcatggctcactgcagcctcaacctcctgggctcaagtgatcctcctgcctcagcctcccatgtagctagaactacagatacacgtaccaccatgtctggctaatttatttttctttttagagatgggttctcactatgttgcccaggccggtctcaaaaccctgggctcaagtgatcctcatgcctcaacctcccaaagtgctaagattataggcatgaccaccatgcctggccttttctgctttctgaggaggaaaaaggtactggtggcagagatccaaaagaaaagttgccagtggcagtgtggaaattcacctgagaacaacaggacaagctggggcacaaatgcaaagatgcagagggaggcaacacctggtcatctgtgagaccttcatgggacctgaagacgcagcacagaggaggaacttgaaaaaggacgggatttctactactcaagcatgtaggagctcaggatattctgtaaatatgaagattttgagtttttgtaggtgaggtaaaaaaatacataggttttttacagaataagacatgtaaagctctcttcattttctttgtattttcatgaagttattagattcacaggccaccataatgccattgtctgtatatcttaatttcaagatattatttgagtaaattttgcttcctttgtatcaagatagaactttgaaaaggtaggtaatttcacagttgatcaaatattctttgcccaaattacttttggttaaaatttctcctaaatgtgctacagagtgcaaactctgtctccctgccattccgctatatacttactaactattattttattcaagatcatgcatgctctacttgaaggtctatttctatcttttcaatgctacccttacccactagcctaatcacattattcctattttcaacatctaggaatcaattacatagtgaacatgcctaagaaataataatctgggcagatgcagtggctcaggcccgtaatcccagccctttgagaggccgagcgggtggatcacttgaggtcaggcgttggtcaagtgctcctagagaaccagsctgaccaacatggagaaaccttgtctctactaataatacaaaaattagccaggtgaagtggcaggcacctataatcccagctattcgggaggctgaggaaggagaattggttgaagcccggaggtggaggttgcagtgagccaatattgcgccactgcattccagacttggcaacagagtgacactccatctcaacaaaaagaaagaatgaaagaaagaaagagcgagattatgtctcaaaaaaaaggaaggaaggaaggaaggaaggaaggaaggaaggaaggaaggaaggaaagaaggacaatctcaaattctatttcattatttttcttccacgctcctagtccagcctarggtgaaygtttccccctccaagaaggrgcccytgcagcaccacaacctgcttgtctrccacgtgacrgatttctacccagrcagcattcaagtccgatgsttcctgaatggacaggaggaaacagctggggtcgtgtccaccaacctgatccgtaatggagactggaccttccagatcctggwgatgctggaaatgaccccccagcagggagaygtctacayctgccaagtggagcacaccagcmtggayagtcctgtcaccgtggagtggagtgagtctctgatgaccvtctagaccccacctctgaagagcaggggactctctggctctggggtccactcatcttatcttctgcatctataccctggggccatgtccaaaccccatctttcttctataccagctcctgagcatagtttgaagccagggmaatggagacttcctgaccttggcttrggggttcctgaagattcatagttctcccccttgtcagagaatctagggacactgactggtctcgaaaccctcacacttaggaactgacctcacacataggaacagttctcttccttcagcattttagcctcttctcaggcattttgagaggcaacttccagaatcagcatttgccaccttgttgaggtcacacccctgttccagatatgagggtggctctttctgaatttcctcttagcaagctttttccgctgcactgtcctcatcccgatatkctgcatcaggctccagaatctcagacaggacatgagtagggatgcagctggtggaggtgacactaaacctgggtctgtccttcccagaggcacagtctgattctgcccggagtaagacattgacgggagctgggggcttcgtgctggggctcatcatctgtggagtgggcatcttcatgcacaggaggagcaagaaaggtgagaaaagcctgcagggtgagcggnnnnnnnnnnnnnnnnnnnnnnnnnnnnnnnnnnnnnnnnnnnnnnnnnnnnnnnnnnnnnnnnnnnnnnnnnnnnnnnnnnnnnnnnnnnnnnnnnnnnnnnnnnnnnnnnnnnnnnnnnnnnnnnnnnnnnnnnnnnnnnnnnnnnnnnnnnnnnnnnnnnnnnnnnnnnnnnnnnnnnnnnnnnnnnnnnnnnnnnnnnnnnnnnnnnnnnnnnnnnnnnnnnnnnnnnnnnnnnnnnnnnnnnnnnnnnnnnnnnnnnnnnnnnnnnnnnnnnnnnnnnnnnnnnnnnnnnnnnnnnnnnnnnnnnnnnnnnnnnnnnnnnnnnnnnnnnnnnnnnnnnnnnnnnnnnnnnnnnnnnnnnnnnnnnnnnnnnnnnnnnnnnnnnnnnnnnnnnnnnnnnnnnnnnnnnnnnnnnnnnnnnnnnnnnnnnnnnnnnnnnnnnnnnnnnnnnnnnnnnnnnnnnnnnnnnnnnnnnnnnnnnnnnnnnnnnnnnnnnnnnnnnnnnnnnnnnnnnnnnnnnnnnnnnnnnnnnnnnnnnnnnnnnnnnnnnnnnnnnnnnnnnnnnnnnnnnnnnnnnnnnnnnnnnnnnnnnnnnnnnnnnnnnnnnnnnnnnnnnnnnnnnnnnnnnnnnnnnnnnnnnnnnnnnnnnnnnnnnnnnnnnnnnnnnnnnnnnnnnnnnnnnnnnnnnnnnnnnnnnnnnnnnnnnnnnnnnnnnnnnnnnnnnnnnnnnnnnnnnnnnnnnnnnnnnnnnnnnnnnnnnnnnnnnnnnnnnnnnnnnnnnnnnnnnnnnnnnnnnnnnnnnnnnnnnnnnnnnnnnnnnnnnnnnnnnnnnnnnnnnnnnnnnnnnnnnnnnnnnnnnnnnnnnnnnnnnnnnnnnnnnnnnnnnnnnnnnnnnnnnnnnnnnnnnnnnnnnnnnnnnnnnnnnnnnnnnnnnnnnnnnnnnnnnnnnnnnnnnnnnnnnnnnnnnnnnnnnnnnnnnnnnnnnnnnnnnnnnnnnnnnnnnnnnnnnnnnnnnnnnnnnnnnnnnnnnnnnnnnnnnnnnnnnnnnnnnnnnnnnnnnnnnnnnnnnnnnnnnnnnnnnnnnnnnnnnnnnnnnnnnnnnnnnnnnnnnnnnnnnnnnnnnnnnnnnnnnnnnnnnnnnnnnnnnnnnnnnnnnnnnnnnnnnnnnnnnnnnnnnnnnnnnnnnnnnnnnnnnnnnnnnnnnnnnnnnnnnnnnnnnnnnnnnnnnnnnnnnnnnnnnnnnnnnnnnnnnnnnnnnnnnnnnnnnnnnnnnnnnnnnnnnnnnnnnnnnnnnnnnnnnnnnnnnnnnnnnnnnnnnnnnnnnnnnnnnnnnnnnnnnnnnnnnnnnnnnnnnnnnnnnnnnnnnnnnnnnnnnnnnnnnnnnnnnnnnnnnnnnnnnnnnnnnnnnnnnnnnnnnnnnnnnnnnnnnnnnnnnnnnnnnnnnnnnnnnnnnnnnnnnnnnnnnnnnnnnnnnnnnnnnnnnnnnnnnnnnnnnnnnnnnnnnnnnnnnnnnnnnnnnnnnnnnnnnnnnnnnnnnnnnnnnnnnnnnnnnnnnnnnnnnnnnnnnnngaggtcatgagaatagcagaaagtcttcaaatcgagatcattatgaaatcctcagacccagagcacataaatcctaccctcagagtcactgagcagttaacattacaaattacaaaccatatccagtcagagtcattctctttcctgcttgtctcctgtactcatgttacaggttagggcagtaccccgagtggagtgaacaatctctggactaacacttgtcaggatcagaagctgaggtatctgcacccacattacaggaacaggatatgtgctcctagggaactgagggtgtcaggagatgaggaawgtccctggagtcacagaaagaaggtatcagatgtgtctcactctgacatatgcaggtgtttatgaaactctgggatttctaaggaaggatgcagtgcagagacaggtcccagaggagacargagctgagagaccatccaaactgggaccacyttgtcactagacttcaaattttcaatattkatagagtgttttctaagagtcaggccctttgctgagtgctatgtgcagcaggatcaaaggcagccaggaggtagaggagtcttgaggtacatcagtcattggagttgaagagcagagattcaaaggaaagttggaactggagctttaaaggagatgtgaagtgggtgactcaacctctgactcagaaaaattgatacctgcagaagaaaaaacccggcgggcttaggactcccagctgagtgttgtatcctccatccctttccacctggtcccttcattttctacccctcacagttccctaacgagaaggtggtccacccaacagacaacrctgcctcagatggttatcaaggggtaccctaagaagaaatcatctcaccctctctttgtccccatttgtcaagtagcagtgaggccgagccaggggatggtgaaagtggaaggaggtgggagttgggcattgggtgtgaagatgctctttaaaggggttttaataaccacttgctaccaggccagtgaacacttaycatagttgatgccttttgagcatgttgcattgtaaactgtccctgaaattcctgtgcacttggcttatgggatgaaacatcctcctagttctcttgtctctcagcttctctgaagtctcattgagcaccttctcttcaatttcttttacacagtaagaataggatcagctgtgctaaactaacaaatacccagatatccaggtttggctcatgytacacgtccaaagtaagtcatscaggaagctctgctyatcatcgtactcaggaagycaggctgacagkctttctcctgcacatctgctcccagaacctccccagcagaatgaagggaacctaagaatttattcactggcttttaatgatccctcctagaaagaacacacttctcgcatttcattttccaatgtaaatcatatggctgcaactaacttcaaataagtgggaatacttgaaggtggaaaacatttaagaagtacacactaaataaataataaaatacttctacaagagatatttatggaggacctactgtgtaccaggagcaatgctaggcattatggatatcagcagcctttggctcctgaaaagcttacacactacctcctggcctaaggaggggcacagggatgctggcaacagtctatttcttcacccgggtactagttacatgggtgcttgcggtgataaccattcaacrtacattctattggtttgtgtgtttcttccaaatgtcccctagttcacaataraaagggcttaaatagagaagtaaaggagaatttgggaatttgaagcaaaagcaagaagccactgaatcaagcacaaatattgagctttgataaagattggaataagaaacataataaatgagayaagaaataggacttttgcaactgaagtgtaattaataaacaaaaagccaaactgagaaactgtcccaaggacaatatgatcgagtaaacaatagaaaatgtaaaggacaagtgaagagaaatgaaggatagaaacagacatctgacatcttaataattagacgtctagaaagtcagggaaatagtggaggaagaggaaataactgaaaacataatagatgtttagtctttatagaaagatgaaataagttcattcaaaatgctgcatagaatgtcagaytgttaaacaattttgttagagtaaaatgactgtaaacaaatgagctaattatgtgaattaagaggatggaaaagcagaaaaacagcaaaaagaaaatacatgtaaataataaggacaaaagctgaattcaatgaaatataaaaatagagaagayaaaatcaaattttgaggcaatgaaaactttaatgagacctctggcaagactcctaaggaaaatacaggagattcagaacgaaaagggtaaatgacatttatacacattttaaaatgcaaaatcttacgaccaactctatacatataaatttgaaaatttagataaaamggatacgtttctagaaagatataaaggtcaaaactacaggaagaaatagaaaactaaaatagagtagagaatatcaaagaaattgtcatgggaagcaaagaatcgccttccaaagggccctgtcctgatcttattgcagatgagggygtcctcccacatttccaggagcagatcatgcctcttacacgtgtgattctagaacatagaatggaacagaatttttgagatcattttatgaggttggttcatttrtatttccagagccagctaagaatagtacargagaacaggattgtggactaattttagccatgtcactgaatccaacagtacattayaaaaacaatacgttttgaccaattttagatttattctaggaatgcaatgattcttcagtgtcagaaaatatataatgtggttaacacattagtggactcygcaaaattcatattaatttaaactgaattcagctcaagacatagacagaatttaatcaatttcatgacatgttaaaggtagtgaaccaaaaatctatagcatatatatttcaaagaaatgaggtggattgcctttgagattgtgcaaaagataggatgtccttcgttgctggaaatgtttaacatagcattggaagttctgaacatcactctgcgggcagaagaaaattaaggctgtgtaaaatgtaggaagacagatagtgactgcagatgaaataatctaaatactggacaagactgcagccactgcaggcccaaagcctgggtttaaatccaagctttgcactttgaagctgtgtggtcttcacctctcccggtgtctgattccygctctgtaacatgaaataaataagaaccaacctccagatgtaaataagtgaacacatgagaagcacttagaatagtgcctagaacatagtaagcaactcaatgaatgtcatttctcattacatttgttaatnnnnnnnnnnnnnnnnnnnnccttggcttaggggttcctgaagattcatagttctcccccttgtcagagaatctagggacactgactggtctcgaaaccctcacacttaggaactgacctcacacataggaacagttctcttccttcagcattttagcctcttctcaggcattttgagaggcaacttccagaatcagcatttgccaccttgttgaggtcacacccctgttccagatatgagggtggctctttctgaatttcctcttagcaagctttttccgctgcactgtcctcatcccgatatgctgcatcaggctccagaatctcagacaggacatgagtagggatgcagctggtggaggtgacactaaacctgggtctgtccttcccagaggcacagtctgattctgcccggagtaagacattgacgggagctgggggcttcgtgctggggctcatcatctgtggagtgggcatcttcatgcacaggaggagcaagaaaggtgagaaagcctgcagggtgagcgggacttaccttcccctggcatattcacacttattccacgatgaggggtywgacagaaaagaaatgtcagaaagctctagaggccactgawatcagatartcggggaacaaacatgacctatrgcgagagdgggatcccaggctgggatcttaatgcagccagatgcatgaggtcccaagtactcaggctcctgcggagcgtccattgagtgatgggcaatggaatttggtgggatggaaatgtttctctaattatctgaggtggtttcaatggctgattatataacctttcgtctttcatttcagttcaacgaggatctgcataaacaggtaatattcctgctttgatttccttgtggggtgggttgcaggaggatatgagtcctttctgtgcattgtaacactgaggctcctccaggaagggaatctcaggcatgaacccctctttcaatgtcagccttcaggcaagtggggaaagagcattgcttggctccattgctgaaggaagcagagatcaactctgttatttatcagcctgagacgcatcctctcaccataatttttctctcctggacttacaggaaggaggctggcaacctgggataacttgtcttttacccccacagggttcctgasctcacygaaaagactawtgtgccttaggaaaagcatttgctgtgtttygttarcayctggytccaggacagaccytcarcttccmaakwggatactgctgccaagaagttgctctgaagtcagtttctatcrttctgctctttgattcaaagcactgtttctctcactgggcctccaaccatgttcccttcttcttagcaccacaaataatcaaaacccaacatrastgtttgytttcctttaaaaatatgcaycaaatcrtctctcatyacttttctctgagggttttagtagacagtaggagttaataaagaagttcattttggtttaaacataggaaagaagagaaccatgaaaatggggatatgttaactattgtataatggggcctgttacacatgacactcttctgaattgactgtatttcagtgagctgcccccaaatcaagtttagtgccctcatccatttatgtctcagaccactattcttaactattcaatggtgagcagactgcaaatctgcctgataggacccatattcccacagcactaattcaacatataccttactgagagcatgttttatcattaccattaakaagttaaatgaacatcagaatttaaaatcataaatataatctaatacactttaaccattttctttgtgtgccatcacaaatactccttaaccaaatacggcttggacttttgaatgcatccaatagacgtcatttgtcgtctaagtctgcattcatccaccagcctaggcctcctgtcttaattttcatacagacagaaatgactccccactggggaaagagcaaagcaatacatgtagcactctttttcaaacactggtctttttttttttcttaacaatccaacattgttatgtgttttgcgtctcatattgacaccttttggtcaaggtagaggacatgtttgttgtaagctttctttttcgtgtagaggatggattcttcactcctgatacacacaatcagtgcacagcagctctcttatacatccagttgatgccttcagtctccctggcttcttacaagcatcttctgggccttgtgtgtccctgggcacctgtccctggtcaattcccgaaagctactgtgctcctcttgcccatctccccttgcaaataatatcttccatcgggggaccggcttcctccaatttcaggagaggtggggctgaaggcacagacttgggcgtcactggcacagatataagtaaatacagctggagtctgcagagaggctggactgagtcagggagtcaggaaagagaagccacacacaaggacaaccaatcatgtttctcataatcttcttaacctagggaataggacacaatcattttttctttttaaaacatctttatccctgatcagcctcatttcctcaaaaactataaaggaaaatgctgctgacttgtttttgcgtagtaatttcagctgtcacataataagctaaggaagacagtatatagtaaataaggaccctttatctgtcttattttcccttttggcttcacaggaaacttgtgagaaacctatgcagcataaaattaatatgatttcaatccagggattcaacgatggaaggaggtcatgagaatagcagaaagtcttcaaatcgagatcattatgaaatcctcagacccagagcacataaatcctaccctcagagtcactgagcagttaacattacaaattacaaaccatatccagtcagagtcattctctttcctgcttgtctcctgtactcatgttacaggttagggcagtaccccgagtggagtgaacaatctctggactaacacttgtcaggatcagaagctgaggtatctgcacccacattacaggaacaggatatgtgctcctagggaactgagggtgtcaggagatgaggaatgtccctggagtcacagaaagaaggtatcagatgtgtctcactctgacatatgcaggtgtttatgaaactctgggatttctaaggaaggatgcagtgcagnnnnnnnnnnnnnnnnnnnnnnnnnnnnnnnnnnnnnnnnnnnnnnnnnnnnnnnnnnnnnnnnnnnnnnnnnnnnnnnnnnnnnnnnnnnnnnnnnnnnnnnnnnnnnnnnnnnnnnnnnnnnnnnnnnnnnnnnnnnnnnnnnnnnnnnnnnnnnnnnnnnnnnnnnnnnnnnnnnnnnnnnnnnnnnnnnnnnnnnnnnnnnnnnnnnnnnnnnnnnnnnnnnnnnnnnnnnnnnnnnnnnnnnnnnnnnnnnnnnnnnnnnnnnnnnnnnnnnnnnnnnnnnnnnnnnnnnnnnnnnnnnnnnnnnnnnnnnnnnnnnnnnnnnnnnnnnnnnnnnnnnnnnnnnnnnnnnnnnnnnnnnnnnnnnnnnnnnnnnnnnnnnnnnnnnnnnnnnnnnnnnnnnnnnnnnnnnnnnnnnnnnnnnnnnnnnnnnnnnnnnnnnnnnnnnnnnnnnnnnnnnnnnnnnnnnnnnnnnnnnnnnnnnnnnnnnnnnnnnnnnnnnnnnnnnnnnnnnnnnnnnnnnnnnnnnnnnnnnnnnnnnnnnnnnnnnnnnnnnnnnnnnnnnnnnnnnnnnnnnnnnnnnnnnnnnnnnnnnnnnnnnnnnnnnnnnnnnnnnnnnnnnnnnnnnnnnnnnnnnnnnnnnnnnnnnnnnnnnnnnnnnnnnnnnnnnnnnnnnnnnnnnnnnnnnnnnnnnnnnnnnnnnnnnnnnnnnnnnnnnnnnnnnnnnnnnnnnnnnnnnnnnnnnnnnnnnnnnnnnnnnnnnnnnnnnnnnnnnnnnnnnnnnnnnnnnnnnnnnnnnnnnnnnnnnnnnnnnnnnnnnnnnnnnnnnnnnnnnnnnnnnnnnnnnnnnnnnnnnnnnnnnnnnnnnnnnnnnnnnnnnnnnnnnnnnnnnnnnnnnnnnnnnnnnnnnnnnnnnnnnnnnnnnnnnnnnnnnnnnnnnnnnnnnnnnnnnnnnnnnnnnnnnnnnnnnnnnnnnnnnnnnnnnnnnnnnnnnnnnnnnnnnnnnnnnnnnnnnnnnnnnnnnnnnnnnnnnnnnnnnnnnnnnnnnnnnnnnnnnnnnnnnnnnnnnnnnnnnnnnnnnnnnnnnnnnnnnnnnnnnnnnnnnnnnnnnnnnnnnnnnagtaatgctcaaagagcccctggtgaagtgtttctctttcccactcttcacccctaacttgttacctcgtcttttccactctgtccctaatacacctataggatgactcataggagcccctggacccggggatgctgtcagatcgcttggtctttgagacaatggtgccattaaggacccccgccaggcccaccagcaggccgagggcacagaccagcatctccatggtctcaggcacctggattagttcatggacctctggggcaccaagggaagacagagttataaggtacagagagcaggggctggccttggatgtgggaggtgttgggtattcgaaaccatgagatggtgaaatttggataaagtgaccataaaacatgggattgaggaaggcaggtgctgaggggcgatgggcccaggaaataaaggtggtgccaaggccgtgagggcagagggagggcgctccataccccagtgcctgaggagaggctggtgcaggccccagtgctccccctggaggtcacaggtgtcctcggccatgggaacgagggtcagatagtggaacctgtgtaatctgagtttcttgctgggcaggaagatggtctctgcaataccctcaatgactggctccccattgcrcagccacgtgatgttcagcactggtgggaagaacttgtcaacatggcagacgagggtgttgggctggcccagatccacaggctccttgggaaagacgcttacctcggtgggggctccaaaaggggatagaacccaaggagcctactgccattggctgattcttaaaggttccaccaccccaagtcctatattcaccagattaggggccacctctcccaggcccatcctcctgctcccctagggctcctggacagggtcacagcttctcgtgctcctgacctggccccctcagcccagcctttctcttgagtaagaagaaaatgcctcctcctctgctgtcctaagaacccagctgtgtggacccaagatttctcgctctcagggaaggggctcattcatgagtgggcatcatggcctctagttctatgtgtggcagagaggccctcccatccctccagctggactctagaggaacaggcagctataggcagtgccatttgtggcccaagtctgtttggaccattgatccgggtgttcaagtgcttccttgccatgacgatgccagcaatacccctctgagaggaacaggcagctataggcagtgccatttgtggcccaagtctgtttggaccattgatcygggtgttcaagtgcttccttgccatgacgatgccagcaatacccctctgagcaccaaagtcaaaggtgtgaataaactctggtagaggccagaccatctccttctcatccaggttcacgtagaactgctcctcctcatcaaattcaaacatatactccccagaggktctgtgcgtctgcacaaactccgcatatgttgacacatggtctgctgcatgaaggagaagatggagaatgggtgaatacgtaggatgctacacagaatgcaggaagcaaacaggtaacaggaaggttattgggaacatgaaggaataacacagaaaatgagaaatgcaaatgaaagaaaagaaaaggagtgagaagaaacaaagacagaaatgacccatggacgatataggttgtttcccttgtccctgaagacttaacatccgtctatgataatggtaatgctgaatacagtaagataatatttattgggcacttactatgtgctaaacttactcattgaatcttcacacccccatgtagaagaacttattttccatagtagggaactgaccccagaggtaaagtaacttgtccaagtcacacaactcctggtagaaacaatattgagtagtcctcctacctcattcctgtaggatctcagaaaccctacaggacaatacattaaaaattactgatatagccataaagcaaggcagggaagtggaaggatggaataaatatttcagagtggaacaaaatcgtgaaggacatgaaaatacctccagagtcttagtgacatttatagacttcaagttacattcttacttttagaagaaaaatgataccttctataattttatccacaacacttacattttaggcagagtaaatttaaaagtattatcattcacataacattcacaaaattgtcttgtggagtgtagttttcaagtgtagtttcacctggaaatacaagttgttggcatttgaaagacctatgggatagtatcttagctttacctgatacataagaagcagcaactggttgataacaaaaagtgaattattattacagtgaattacagagagtttagggttcggcctggaagaggaagtgaagccaaatgacactgcatggttggtggtccctaagtgaggatttcccctcccagcccagcatggggagaaccagtcctctacttagatgcatagtgtgacagcaggttcagtgccgcacacggatggtgagggtcccccactgagtttagggtctagaggattactcacctacagaaatgaatcccaaaggaaaaagaaaaatacatggtgtatagactgggctacacagatgtaattggttcagcttaggttactttgtatttattatatttacaaaatctgaaaactaaaggttggcacattttgaagcaaattccacacttcaaatgttaattttcattcagttaataaatgctttttgtgaactttcactctctaggtaataaggatgaaactctaaagatgggaactttgtccttaatctacttgaaattcaagaataaaacagacaaagaaaagatgattgctacatgtgtggtttgatcaccactgagtatcacaaggtatacacaagagctactcaggagcaaaattaaaatacgatttaggaaaggttcctagggacagtgttcacctgcagatagcaaaacagagaaaggggaaatggcatttccagcaggagaagcaggctcaggagcagagaggcatgaagttgcaaggagaactgcagttcttcagtgtgactgaagccaggggagatgtgggccaggcagcactgtaacctgccttgtgtgctgatggcaagtgtttgcattttatcccacaggacataggaagttgtgaagtatcttaagcaggagagtaacacggtcagatttgtgtttggatggggcacctgtaggaaggatgggctggaggaggcgggactcaaggcaagaccagtagcacttttaagccctctggtgggaagtaatgaaggcgtaggccagggcaggaacatggggtgaggaggacagcagatggatttgatggcagtaatgacatgagaggccacaggaatcactaaatcacatgccagaagtagggatatgaagaagtcgagaataaccacgcaacgtggagaattgtggcatccgtgcctgcaaaggtgataattaagtgattgagagaaggt

SEQ ID NO: 8709 - DNA, 16822 bp, Homo sapiens
ggttcctgccctcagtgcgtatactgctccccactttcgttgatgtggtagtggtgatgactgagccaaccacctaatgtggaaatgagaggacagcaagattgtgggtatggaatggggcaaagcaataagggaaaattagtgtggcagggttcagtacagcagcctgggttcccatttccccccatattcaaatgctgacactctcttctcctcccaggtccagcctgtggtgtccacaatgccccaggcctctgagcaccgcctgggccgtacccgagagccacctgttaatatccagccccgagtgggatccaagctaccatttgcccccagggcccgcagcaaggagcgcagaaacccagcctctgggccaaaccccatgttacgacctctgcctccccggccaggtctgcctgatgaacggctcaagaaactggagctgggacggggacggacctcaggccctcgtcccagaggcccccttcgagcagatcatggggttcccctgyctggctcaccacccccaacagtggctttgcctctcccatctcggaccaacttagcccgttccaagtctgtgagcagtggggacttgcgtccaatggggattgccttgggagggcaccrtggcaccggagagcttggggctgcactgagccgcttggccctccggcctgagccacccactttgagacgtagcacttctctccgccgcctagggggctttcctggaccccctaccctgttcagcatacggacagagccccctgcttcccatggctccttccacatgatatccgcccggtcctctgagcctttctactctgatgacaagatggtgaggacttgccacacacatggccttcatgcccatgttcctctgtgctttcctgccatcctctgccttttctgtcccccatttccctgaagttcctttctcagcccttcattacagcagtttggacatgcctctcccttgcttaaatacccttgagcctcctagacccttttttgggttgttggtgactcttcagcatggtgtgccatttcggtccccaggggattaccccaactatttagaattcttctttgggtccccaggcccttcctttcccttgcttgcaccttctctactgggactctgcctaggcctaattaatctctggagctaaagagaggcaggcacagaacatcttagcaaacgtggttgcacattttctgagctaagtaagctaggctgattgcaattggagccagcaggagaagggcaagaaggggccacgggggcaggagggggttttgggggcagaaaggtgggagtggtgagcagctgggcaaccatgccggtgctgggggagttgccccaggagctgcaacgtcarctagctgagcagaggagtaagtgggcaacaggtgggacagccatggctgagtcygtggtacattcagctgtgatgggcttactgctcatgaccagtgaggtagggagactagaatacctagtgaggggaatagggtagagtttggggatgaaacatgcatgggatgggggaggcagtgggcagcatgctgttgaaaggttaaagtgccaggtaggatatataggaacttgccgattgtactctgaccttccaggctcatcacacactccttctgggctctggtcatgttggccttcgaaacctgggaaacacggtgagagctattctcctatctttcctctctaaaaggaatgtgaaatggtgctgggggtggggaaaacccacgagcttggggaaggcatgtggaaggagagctctgaagctcttctaaggcttcctgggcagtggtctggagagataacagcagtgtccctactgctccccagtgcttcctgaatgctgtgctgcagtgtctgagcagcactcgacctcttcgggacttctgtctgagaagggacttccggcaagaggtgcctggaggaggccgagcccaagagctcactgaaggtggggcaacaactcctgctccctctgttcaagtccctttttccccaaccacttgcaggtccatctgccactggtggtggcccccaacccttaaatctggcagttgtatctacttttcccagtgcctactttcctaaaggttattttctaccctctgagccaccttttgcttgcctcttccagacattaacctttgtttgccttccccactcccatcccaacagcctttgcagatgtgattggtgccctctggcaccctgactcctgcgaagctgtgaatcctactcgattccgagctgtcttccagaaatatgttccctccttctctggatacaggtgggagagctggaggctatgggatttctctctggccatgtctgggggtagggccaagcaagggccctggcagcattgttctgagccttgagatgttcttcatccaggaagtggggaccaatatctgggcagggaatagtgtctgtggactaggagaggagtcagttgcccatactctttgtctggctgtagccagcaggatgcccaagagttcctgaagctcctcatggagcggctacaccttgaaatcaaccgccgagrccgccgggctccaccgatacttgccaatggtccagttccctctmcaccccgccgaggaggggctctgctagaagaacctgagttaaggtaagggtcgttccctctacctcctttccccgtagtttatcagcatcattcacacttcatagaactaaactagtaaagattgaagatgtagggtccagggaaaccctttagtatagaaaatagtatgagaagcaacatagaagtagaaggaaggaaggaagagggggagtctaagggagcagatggaggcagaagatcatgctagggatgtcaccaaattgaagaaggggataattcatttacaggtagaggaagacagcatattcttcccttatgtacattcctttcttttcctctcacctcggatttccctagaaagttcattgaggcattattcttttgacttttccttgaaatttagggaaggagcaggggtgtggatggggagtagggctctgtaggttgtttcagtgggtgttgggggtgcccagtgttcctgctgtctcatgggtgctccccacttcctttgatctgtggtagtgatgatgaccgagccaacctaatgtggaaacgttacctggagcgagaggacagcaagattgtgggtatggaatggggcaaagcaatgagggaaaattagtgtgtgaggggggtacaggcttggggggaaaaatcgatactatcaaggggtatgggaacaagactggatgatgcaaatgtgaagctgtgtgaagagttgattaggagtgttggtagtgggaaaggaagggtcaagcaaaggggcaggaagagatggaaatccaagaaatcatctcataacatccaacaatgaccttttctcctgtccctgtgcttctgtctagacctgtttgtgggccagttgaaaagttgtctcaagtgccaggcctgtgggtatcgctccacgaccttcgaggttttttgtgacctgtccctgcccatccccaaggtgggattccagaggattccggggtggacaggacaggggctctgtgacccaagcctacccacccccagagtgtgggcgggaaccctgtgggtttctggagcagaactgaagcctggattgattgagaagagttggaaaaggaaattcagaacatgttgacctttcttccccttttcccccagaaaggatttgctgggggcaaggtgtctctgcgggattgtttcaaccttttcactaaggaagaagagctagagtcggagaatgccccagtatgtggaggttcacaagggatacagtaagggtgggagacctggggggactccatgtggataaaagggattgcatgatgtcttcatatggggaataatatttatgtatctgggtttgtgttggagtctcagatctgttctagtactcctagagcaaaggggagaagccaagaggatccagctgtaatgaagagcatactaaatttgtatgtggatcggggtgtcagaaaagccaattgaggttaggagcatattaacctaacactgtttgccatttattcaggtgtgtgaccgatgtcggcagaaaactcgaagtaccaaaaagttgacagtacaaagattccctcgaatcctcgtgctccatatcctaatcttcagattcttacttctcttaggatacctcccatacattctctttcctccatgtttccagagaattgaattttccttaggaaaagtctgccacccacttttccacaagatgctcccagtgtgtcgggagtggggagaggacagctttcaggatagaagaagttcccctcagaggcccactgcctcccaaatgctccttaaccagggcttagatctgaatcgattttctgcctcccgaggctccatcaaaaaaagttcagtaggtgtagactttccactgcagcgactgagcctaggggactttgccagtgacaaagccggtgagtctggtggggaaagtcctaaggagccaaaggagtgggggcacagctctgattatagaacttgatcatctccaaccccgcaggaagtcctgtataccagctgtatgccctttgcaaccactcaggcagcgtccactatggccactacacagccctgtgccggtgccagactggttggcatgtctacaatgactctcggtgagaatagcctcctatttacatcctgccccattcccactcagccctgacaccctccccttctatgaagctccaggagagcagagtgccaggtgaaaggagaggtggaggtcttgcctgatcatttcctggatgctctgaggttcggtcttgtagggagaagggagtaaacaggaatgaccacaaccctttcccgatctccttttttcctagtgtctcccctgtcagtgaaaaccaggtggcatccagcgagggctacgtgctgttctaccaaytgatgcaggagccaccccggtgcctgtgacacctytaagctctggcacctgtgaagccctttaaacacccttaagccccaggctccccgtttacctcagagacgtctatttttgtgtctttttaatcggggaggggggarggggtggttgtagctccattattttttttattaaaaaatacccttccacctggaggctcccttgtctcccagycccatgtacaaagctcaccaagcccctgcccatgtacagcccccagaccctctgcaatatcactttttgtgaataaatttattaagaaaaaatgatgtgcttatttgtatttttgcttagggggtgatagagaactgggccaaattggagtcttcttgggacccaagttccctctctaacaggtgggggcgctctcagagccgagggggaaggtttcggggatggtgctggacccggacctgtgtcccccagcagtgaaggttatgtactgggaggaaaagaggaaaggcatacttgagtgaggctgcgtgcaggctctggggcgactggtttggtcggcgatgggggagtgccactgttgacaaacacygggtacgttgccgggcggccctagctcccgtaggcccggtctgttgctaacatcaaggagctgtttatggagccgcctccccgtggactggccttaagtgtccctatctattctccctacgaccaaagctcctgcggccttccctctagggttgtcaccctagctggacctggtaagcttgtgctggggaacgctaactccagcattaagcgctcgccgcctcggtcctgaggagggcagtgacgggtacggccgctcactcccagctcggcgctaacacggttaacctccagctcttacagctgccgtcgctccgcctctgccagttcaatgttttattggtgaacgtgatccggggccttccaagtcccgccaatccagatgtaggagaggtagggttaggcgcgtgccgcgagaacagagtggacggagmgtaggagagaccgaaaaggctgggggtgggagtagcggatttgaagcacttgttggcctacagaggtgtggcaagcagagcacctcagaactcaggcgtactgcccgccgcccgagccstgcgagggccgatagcgagggtgtggcccttatctgcacccagcagagcgccggcggggtacggtcttaggacctcgatctccttctccctcattttctctcatccctacctattgtgggtgagtcctggcccctggacggggacctcgctgttccaccagcccatccgtgcacacttagtttcccctaaagcagtgagtggccgggatagaactcaaaaccggcggggcttctggagcgcaggttgtccccggtctgcctgtccatatcgccccctttcccccaggtttccgcaysggccggaccgtggtcgtgctgggcggargcaycagcggcttsgccgccagttaccacctgagccgggccccctgcccccctaaggtgagtgctccacttgtgccagagggagcttcatttaatgctcttcccatttccatcaaaagctagatggatcctggccctctgaatatgcctcttcccctcccctcctgacctctcgscggcggctacaggcggtgctgcagtgtctctccctcttgtcgccaggtggtcctagtggagagcagtgagcgtctgggaggctggattcgctccgttcgaggccctaatggtgctatctttgagcttggacctyggggaattaggccagcgggagccctaggggcccggaccttgcycctggtgagaggcttgtgggatgtctaggagaggttgtggagggggcttccattggggaatagagtttaggggaggaagtatgtttggtgggtcagatcttcccttagtttctcctcttctgagggcatgtggagagcaggtttctgagcttggcttggattcagaagtgctgcctgtccggggagaccacccagctgcccagaacaggttcctctacgtgggcggtgccctgcmtgccctacccactggcctcaggtaacaccagcacctccgctccttttactgtgccctcatcctcatatgccttccatttctttcttcttttctttttttttttttttttttttttttttgagacggagtatcgctctcgcccaggatggagtgcaatggcgcgatcttggctcactgcaacttccrcctttcgggttcaagcrattctcctgcctcagcctcccgagtagctgggactacaggtgcctaccaccacgtctggctagtttttgtatttttagtagagatggggtttcaccatattggccaggctggtcttgaactcctgaccttgtgatccgcccgcctcggcctgccaaagtgctgggattacaggcgtgagccaccacgcccgacctgccttccatttcttcatctccctgtcagccttcccagcaaaaggaagccaaatgagtggaaatgaccccagygcctggagctggggaggtatgtcaggagcttccccctcactatgcctttctccatgcagggggctactccgcccttcaccccccttctccaaacctctgttttgggctgggctgaggkagctgaccaagccccsgggcaaagagcctgwtgagactgtgcacagttttgcccagygccgccytggacctgaggtgacacttgcccagaggccccaaacctcttccctcctaaaccagctgcagagctccctgttcaaatctaccacctaggggctcttctgtatcatttggggatgccctcttctcttcataccccaccccctcataattcccaaaactcattattgggagtgaaggccttcatttccatccgtcacagtgggaatgtcccccaayccaaaccctatccyaccctcattccctaccaaataggggctgtggaaatcagtcagtgtagattattttttcgctccttagtcctagtctcacccttaagrtggcgtctctagccatggacagtctctgccgtggagtgtttgyaggcaacagccgtgagstcagcatcaggtcctgctttcccagtctcttcyaagctkagcaaacccatcgttccatatkactgggcctgctgctgggggcaggtgaggggggattgattcagagggtgaaaatattaagtactgccaaagtgagggagtggggacaaggggtgctattcaatgattctttttttcttttttgagacggagtcttgctctgctgcctaggctggagtgcagtggtgcaatctcagatcggctcgctgcaacctccgcctcccagattcaagcaattctcctgcctcagcctcttaagtagctgggattacaaacatgtgccaccactcccagctaatctttgtatttttttgtagagatgcagtttcactatgttggccaggctggtctcaaactcctgacctcaagtgatccacccgcctcggcctcctaaagtgctgggattacaggtgtgagccactgcatccagcctcaatgattcttctttgcttcctctgcagggcggaccccacagccagactcagcactcattcgccaggccttggctgagcgctgragccagtggtcacttcgtggasgtctagagatgtygcctcaggcccttgaaacccacctgactagtaggggggtcagtgttctcagaggccagcsggtctgtgggctcagcctccaggcagaagggcgctrgaaggtaggggaacccctggagtgtaatgaacctgtcagtgtttccatctttatccaagtggcttaactaggccagggccgataggactggagttcctcattgtttttgtgccttagaagctacttagacatgggctaccccagaatcctaggccctatttgtgaaccttcctcaaagagcctatgcaagtctgtggatagaagtagtacttataagtggcttagagataggggaaagaacccagcttcactgaacatttcagaacagccacactggcctgtctggtccacttcctggagtacacagaggaatgattttttgtgaagtctacatagtcacccaatctcttcatcctgggtcagtacacagtctccccggccacatgggtgcctgggaaactgagagtgaggcaccagaagtctcttttcactcatcaaattctcattttctgggtctctcaaatgttttcatgctctcaggtatctctaagggacagcagtctggaggctgaccacgttattagtgccattccagcttcargtaatggaatagccaccttccccttccccaacccctaccagtgagaagcaaaagctataccttcctgggtcagcaggaccacaccatgcccctgaactggtcatctctatgggagtctaatcccaaagaggactgacaactgtaatgggaatgccttctgagtcaggcctctgcctgatctctagtgctcagtgagctgcyccctgctgaggctgcccctctggctcrtgccctgagtgccatcactgcagtgtctgtagctgtggtgaatctgcagtaccaaggagcccatctgcctgtccaggtatgataaagggacggagaggctgggcatggtggctcacacctgtaatcccagcattttgggaggccgaggtgggcagataacaaggtcaggagttcgagaccagcctggccaacatggtgaaaccccatctctaygaaaaatacaaaaattagccaggtgtggtggcttgcacctgtaatctcagctactcgggaggctaaggcaggagaatcgcttgaacccaggaggtggaggttgcagtgagctgagatctcgccattacactccagcctgggtgacagagtgagactctgtcccccccacccccccaaaaaaatgggaaggagagacagcctcagctagagccctttccttctgacgcatgaatgtccttctctccagggatttggacatttggkgccatcttcagaagatccaggagtcctgggaatcgtgtrtgmcycagttgctttccctgagcaggacgggagcccccctggcctcagagtgactgtgaggaggaggaaactttgcctagtggcatttccagagggctcctctgtgctccattgtaggcaaggccagactgatcagtgctatattccctccttaggtgatgctgggaggttcctgrttayagacactggaggctagtggctgtgtcttatctcaggagctgtttcaacagcgggcccaggaagcagctgctacacaattmggactgaaggagatgccgagccactgcttggtccatctacacaaggtaagttgggataaacttccctcagctctccactgaaggccttgaagacagagactggaacatttgtcactgtatgtcagccaaggcctaggacatcaataataaacttttccctgcatcctctcctctcttctcagaactgcattccccagtatacactaggtcactggcaaaaactaggtaagttgggaaaacagctgggctgaggagggccaaggacatcagacccccagctaaaacattcctttcatcctttccttccagagtcasctaggyaattcctgactgctcacaggttgccccygactctggctrgagccycctatgagrkagttgctgttaatgactgtatagagagtgggcgccaggcagcagtcagtgtcctgggcacagaacctaacagctgatccccaactctcattcatgaaaataaaaattgctggagcttggcttggtctggctgttctatcacctataggcataagaatgcggggcagcaaagaggcaaagtgtgcctgggatgcagraagcaggagcagatgcgagacaaagtcctttattagaaaatatatcaaaatcccagccccctgagccaggaccagaagagggagctattccagcataggcagaaaatgcccagggaggggcttccttcaccaaacaacttcccgggaaccataaatagaataaatattcacagaggtccgaggagaagccagatcactcttctctccatggaagagggaggggcttggggtccagccctgctcctactctaggggcagggactcctaggaatcgtcacataaaatcatgacatcaaggattcrcagtcataagccctacaggagaccctagagagagggacccctsaggtctacaggagcccagctccagtccagcagtgagggagaggcccctaccccctagcacggcaccagagttcagttccctcacatccctctgagaacagtgaggagctgagggtggggagaatacaaccccatgaattcggtttcatgattaaggtagacaggaaggaggagtcagtgtgaacctcggagggctgtgtggttggcagtagatagaggcccaggcctggctgggggccggcgttgcagcatctcttgacggaaggcttgggaggaaccaggtgggtaacgtggcccagaaggagcccgaggaccccgagggtcagtcccaatgtctgctgtgatgttggtataaagaggccccagctctcgagccagcaactggtatgtcagtgagttcatcccatcttgcgtccaggaattctgggtacggaccaggaggtcaaatctgagggttagaggttggagactaagacccagaaaggaacagccagaaatctagggacctttaggattttcctggctaggggtacagaaccctgaggatccagtaacaattcccaggcagtccttccttcttcctacctgtggggattttcctcattgcccttatctcctcggtgcttcaccatcttatagtgtcctacagatgtggggggccgagagatcttcatcccagccaggcgcaccctatgggaaaagtgagggtatcatgggggatccagagtagagaaaagcaaggaagggattaaatgtttctgtacacacaaaaaaacaactattacttagtaggcaaaagaaaaaaaaagcccaggacagaagtcaaacagaaagaaggaaatggctgaagagaatataaaagctggatgtatccaaatcctcagggcccagtgccagtcaccctagggcctttaaacagttggcaacctattcccttggcttcctaaagggctcctaggagctgcccttgcagtctaggaaggacgcagagagaggccattctgtcaaaagaataagagaagactgggagttgctgagaatcttagaatagtgactgagctaccccagcttctctcccacatcccccatgttaagaaaaaggtaggccaggtgcagtggctcacacctgcaatcctagcacttttggatgccaaggcagaaggatcacttgaggccaggagttcaagaccagcctgggaaaataatgggaccttgtctctagagaaaaagaaaaaaaaaaaaaacgaaagaaagaaaagaaaagggtagaaccaggtaatcaggaccttaaaagaaacaaactccacttctgacacacagaagcatggagtgcagatggcctgggaaggaactagaagaatacttatgtatatttacaattcactgggtatttcacacacatacagaggatgagaattcacagagatgtcatcacagaggacacagggggaatggaggcaattggtcctgcataccaagcccaaatattcataccacagacatgaaattgggtcagctgaggctgaaggtcagaatgtttcacatgctaaaaatgagttggccctgtgccaatggcacaggccttttacaaagcgattctgggaacatggagcagagcccctctctcctaaccccataggaagtggcctggctggaaccccagcagaaggcaagactaagctgtctctgggcccctttccagttctggaatccgacgatactatttcctattgatcttatgtcctctcccaagaacaaactaaccaggagactgaaggatgacacaatgggcagtagcatgcaagcctgacctgggtatcctaaaaagactaagggaaaggaatgggctcagtgcaggaccagggagctaaaggttagtgttgaagggctatggtcaaaggtggtcttagaggacagggatccagactggggtcaggagggaggaagtggcaggaagtctgacctggtagcaatgtcgtcatcctcaccaccccagccccagtattcattggggaagccattcatcttcaggtactggtcaggagtaagtgctgagactcctccgaagtactgggggtacgggaggctagggagagaaagatccttgcataccccgagtcttctggggacacatccccaaccacaatccgcttggctctcctccttccacaggatagtaggcttccctgtttcccagtacccttccatgccctctacctgtatccaaacttgttcatagcaacggcaacatggcggggtccccgggggtcacacacatacagattgtggtcattttctggcaagaggtccacatcgtgcaagaacaggcagtcccactcttcatcacgcagggcctctcgcaccccaacrttcaacagttttgccctgttaaatgttccatttccagcctggaagataatggaggggaaccagactatgtctgtaggtggcacggagaaaagggggctaaagaataaaagtgaaggccgggcgcggtggcttacgcctgtaatcccagtactttgggaggccaaggcaggcagatcacaaggtcaggagattgagaccaccctggctaacacggtaaaaccccatctctactaaaaatacaaaaaattagctgggcatggtggtacacgcctgtagtcccagctactcaggaggctgaggcaggagaatggcgtaaaacccgggaggtggagcttgcagtcagccgagatcgtgccactgcactccagcctgggggacagagtgagatctcaaaaaaaaaaaaaaagaaaaaaaagaataaaagtgaaaagagggaaatcaaagtggggtggagggcaaggagaatgaaaaagaaagactatctttttcatttttccacttagtcatttgacaaatcttgcttgtgtattggtatggacctgatacttaagatgctgctgtctaacatttaatcctgacaattggcaaccaacaatggtgtggtgtggaacagatggtatattagttatcttatgctctttcctcatgttagatgtttaagtatcttgctcagagtcatacatgtaacaagtgacggaactagaattttagccctattgtgtccaattccaactctgcacaagccattcaataaagaaaaaatcacaggagagtgtaggacagtgggaataacctaagcagattaaggaaaagtatgggactaacaaagttggaagagcagtgccgggtgcttctccacactctaacagtctggccttcttaaaattattctagggacccatttagatgaaagtgaagtggcatgtgcttgaggcttccttagaagaaagtcagtcaaaatgaggtggagattgggggtacctggtggatgacatagatgccataagcaagctgctggcgctgcaagaaggggtgcaggtggtagagcagcaggcgcaggtggtgctcccgggcacgatgaggcacaatgatggctgttcgggagcggggctcacaacctgcagggcggtaccggccccctggttctacccggggattccgctccacaatctctgccagtgatggcactgggctaaaggacacygacacaggacccactgttgggaaggaatggcaagtagagggatcagaggggcaaagagaaaagaatcaaactagggtttgggaatacctctgacactggcagtctggttctggggcttagttctcagggctcactcagaaatctcgcatgccttggattacctatcactgggacagctctacaaaggctggaaggtgcaggatccttacctagccttctcttcttattttagggttgcctaactttctcctgtcttacagggttggaagctatagttgaaggctggagagacttgcaactaattaaaccagggctcatctacaaggaaaacaattcctagcctggggcaggaagagcccataaagggacaagcagtagaaagtggaaacccaatagtctaatctaaactcccaattcagagtctactctatctcaacctcagccctctatctcaacctcagcctacctgcagcctcagcctacctatcctcttctaagttccacttctgccactccatgcctccctatccccaagcctccctgtctccgcaccttgtccttcctttcaccacctccttcctcctgcacttacctaagagaggagatcgttctggacagtagggcagaccttgaggagctggaggaccccctggggccccaggcaggtgactgaggttactgtagacatcacgagggtgagaatagtcaaatgtcggtccctgatctcggccaaatagggcactgagacttcggaagccccccagtgacaggtacatcatgacagccagctgggagcccacaagcagggccagcgtgcaaggccgctccagcagcctccgcaacatcctgggggtgagatctagggagggagaggggaattctgggggtaggcaggaagagagcaagccagcagagaggtcagtaggtagggttgaaggtgatgccaggggtaaagaggaaaaagcagaaaacaaagtcacagaagggagcacacaggtgcacagtcacgcaaggaaacagaatgtaaccaccagtaaccctaccacctgtcacttcagcccaagtttcgctctcctctacctccccccaaaccactcccaccatctactgtcagtcctcacccccaaaaatgtttacatcattcaaatctcatgttcatttcagaaagtctctagagaaccccctcttccaattttagaagggaagagatagactcacctaggttcaagctgtcttcttagggatcatgggggctccagggggtcccggggggacagagatgtgaggcattatctaaaattggaaatgtcacagagggcagagaaaggctccatccagcactccagcagcgaatctgggaccagctggaacagaagtggtaaaggataactagctacctgcaccgccagagatcaggatcagggtgaagctggtttcccagcaggcgaagtgaaggaaagtggttggaaaggaagaggaggagcaggagatggtaggtccctcgcctatctcccgtgctaccctggaatgataagtgtcaggttcatacttaaccacccccgtacccccaccccaacaggacagattggggagtggggacaggacagctaatggaaacattgttttcccccagaccaagaaccagttgaagtggcgacagagtcatgacaggaccgtggagtggcctaaggagtacccagggcgaagtaggaaacaggctccttctattcttcatgtgcctgggtgccaactcctcaggtgcagggaccgtgaccacctgggggctgtaagcgaacagccccggagctcggcggagagtagggtgggggtggcgtcctctaccttttctacctttcccctcttctagcgggggtggggaggagggttactgctgaagagaaagggagagggagagcaggggcagagacagtcaggggtggctggaagggctcacctagaggggcgtggtccgcgctgtggagggggttaaaacccagctctttcgg

SEQ ID NO: 8710 - DNA, 34688 bp, Homo sapiens
gagtaatttcatgaatgcagactacatggttgtttatttagtgatcagttacttcatgttttgtgtcagagaaaacatgtacaaaacatttgagaaaatattttaggacattatgtctaaaaattgtatactgagaaaaatcctatgaatgtggcagactataaaagcctttggtgggaagataaaccccctcagaagtgatcatagatcatgaataaactactaattcgtggaaatgtaataattataggaacgtctttgcccaaaaataaaacttcaacagattgagagagttcacactggagaaatactttcctctggcaaacccctgtggcagggttttcagtaaaatgttttgcctcatcgtgtgctaggaaataatgcagaaaaaactwatgaaaacattcaatgtagaagacttttaggaaaatatcagagaatttaatgaaggaaagaagccttggcaaaatgatggatgagagctttctgtcacaattctaaccttaacagataatatgcctcatgtgcatttgggaacaggatagcttgagccatattcctagttgccttgtcactgattttatacattttaaattgtgacttcctctaatcacgaactaaaatttaatattgtatataataccggagtattttatgcctgcctcattttattatatgattagctcctgcatttctttggttctaagtttgtgttatttcagaataactaaagtacttcagaatgaaactggatacagtatattcagttcataagtgtaattgaccatacttgaatatgtttaagtttataagtaacatcaggtgttatgaaattaatataaataagatgtttttgtaagtttttattttgaaataagtttagattcacaaaatcttaccaaaatattccagagttcttgcccttaacccagcttcttccaaagataacaacttacataagcatagttcattaccaaatacaggaaagtgaaattgttacaatactgttaactacagaatttatttggaaatcaccagttttaacatgcatgcatttttgtttgttttttatatgtagctttaagaaatcttaacacatatattgattcatgtcaccaccaccgtaatcgagattcagaatgttgcatcaatgcaaactccctcatgctccttgtttatagtcacaacctctcctcagccctaacccttggcaatcagaaatcttttcatctttagttttgtcattagtagcatgttataaaaatggaatcatacagcatgtacccttttggtattggctatttcaactaaagcagattaacctgaaatccatccaagttgttctgcatatcattgttctgtttttattggccactaataatctatgatacgaatataccactatttgtttattcacccactgaaggacattagttttgttcccggtttttcttactgttacaaataaaaatcctatgaacatttgtacacacaggctttgtgtgagcacaattttttacttctctaggataattactgcagagtatgattcatgggtcataaggtaagtgtatgtttacctttgtaagatactaaccagagtggtgtttcattgctcaccaacaatatatagaaaggttcagttgctccacattcttccacttgatgctgtcagtattttttttgttttgtattgttttgttttgagatgtagtcttgctctgttgaccaggctagagtgcagtggcacgatcttggcttgctgcaccctctgcctccggggttcaagtgattctcctgcttcagcctcctgagtagctgggattacaggtgcctgccactgcgcctggctaatttttgtatttttagtagtgacggggtttcatcatcttggccaggctggtctcgaactcctgaccttgtgatccacccgcctcagcctcctgaagtgctgggattacaggcgtgagccaccacgcaggactggaatgttttattttacctattctattgtgtgtgtattggtatgaatacaaacataccaattgtatgtggccttccatttgcacctccctaaaggctttttttttttttttttaagagacaaggtctcactatgttgctcaggctggagtgcagtggctattcacaggcaccattatagcacactacagtctcaaactcctggtcttgagaagttttctgtcccagcctccagagtagctgggactgcaggcatttgccactgtgcgctgcttagagcattgtttattaatgctggataaagattttatccagctggataaaggttttatatcacttgcaaatatttttccatagatgtggttctttctttttttttctcagagaaaaagattttaattatgatgaagtccaacttttttttttgagatggaatcttgctgtcttgcccaggctggagtgcaatggcatgatctcggctcactgcaacctctgcctcccaggttcaagtgattcttctgcctcagcctcccgagtagctgggattacaggcacctgccatcatgtcccactaatttttgtacttttgtagagattggggtttcaccgtgttggccaaactgggctcaaactcctgacctcaggtgatctgtccaccatggcctcccaaagtgctgggattacaggtgtgagccattgcacccagcctttttttttttaatggattgtggggttttggcattacatctaagtattccttccttactgtaattgataattctttttccacttcctttgacaaaataatgtagttttgcttctttttttttttttttttttttttttttttgagacagagtctcactctctcacccaggctggagttcaatggcatgatcttggctcactgcaacctccgcctcctgggtttaggtgattctcctgcctcagcctcccaagtagctaggattacaggcacgcaccggcatgctcagctaatttttgtatttttagtagagacggggtttcaccatgttggccaagatggtcttgatctcctgacctcgtgatctggccacctcagcctcccaaagtgctgggattgcaggcgtgagacaccacgcccagccagttttgctttttaatatttagcaatatccatttaaattcatctttgtatatagggtaagggttaatttaaagttcagcctatggttgcccagttgattcaacagtattgaaaacactgtcctctttccattaaattgattttgaacatttgtaaaaatcagttgcctgttcttgtgtccatttcttgactctattctgttgatgtgcgtgtctatcactccactaataatctacggtcactcccatcagaaatgacataatatgctctatgaggtaaaacagctatgttacctcatataaaatgttcaaagccagaacctggactttgggaaatgtcccatatccctctccggaagcccgcctcccagtctctcggtgttcttagagatggcgaaggatggggttgcagcaccagaattccagaatcggaagtaggttctgatacgtgttcagcctttggcagctgctactgtagccttgaaagcctgatgctgcgtgtgaatccggatggggagcttgtggggacgaccatgaagtggaaacgcatgtgaatgtccgtgttcaggggttttatttcagtttagtcaccgaggaatatgggtgtgagaaagagacccttgggatgtcaaaggttaaggcttagttttaagagtttaatgactgagggtcccacggacagagcttgaggtctatatgttcacttttcatgagtctcagtaatagaaaactggggaaagtgtgtctcagtgaatgctgttttttgctcagatttgcaatttaatatggggctcagatacagagaagcccgagctaggaagaggagtggcgtgaatgaaaggtctagggggaggagtgtcaaaggagtgcctctgtggtaagttttaaattgaatttgaaggcaattttatttagaggaagacggggcttgtctgtgtttgagaatgtaatgaggctggaggctttcaggtgtgcagttgaaggttagtggttgctttgagactaactggatgctggaaacacttcctgtcagtctttcaagtccaaatctgtcctgaaggtttctatttaaaaactttttcttcctaggtccactattctcattgtacccataaaaatcagagtaattcagggtgacgaagtggtgtctttaccgaggagtcttgctctgtcgcccaggctggggtgcagtggcgcgatctcggcttactgcaacctccgcctcccggattcaagcgattctcctgcctcaggctcccgagtagctgggattacaggcgcgcgccaccgcgtccgggtaatttttgtatttttagtagagactggtttcgctttgttggccaggctggtctggaactcctgacctcagatgatccgcctgcctcggcctcccaaagtgctgggattacaggtgtgagccaccgtgccccacttcactttcttaaatgttgtgtttagaagcacaaacttaaaaaaaaatcaagtccactttattaattttattttgttttgtgggtcatcctttactctcctctcagaattaactcacgtccatgaggattatctcccttttccttctctaagttttatactttctcttaaacttagatctatgatctattttgagttaacttttgtgtatggtttgagggtcctaactcatttttctggatgtggatatccaattatcccagtgccgcttgttgaaaagactattcttattgaattgtcttggcacttttgtcaaaaactcttaacaatatttttatactctcaattctggctctgctcttcccattggcacctttactaaaagtggcctttctaggaggcccaattcctttagtctgtcgtggccaggctcacatcgtaattcattctcaaaatctcttttctctcctctcctctcctcttttctcttcttttctcctcttttctcttccttctcctcctcctcttcctccttcttcttcttcttttttgtaaataataatcattttttcgaggccaggcgcggtggctcacacctgtaatcccagcactttgggaggccgagacaggcagatcacgaggtcaggaggtcgagatcatcttggccaacatggtgaaagccagtctctactaaaaatacaaaaattagctgggcgtggtggcgcgtgcctgtagtcccagctacttgggaggctaaggcaggagaatcgcttgaaccagggaggcagaggttgcagtgagcccagatctcgccactgcactccagcctggcgacagagcaagactccgtctcaaaaaaaattataatttttttctttcttcaccacccgcccccccgaatacctgctatttttctgttcttaaaaaccgcttcctgcaagctaattttcgccagacgctttcccgtgggtgtctgcctacctgatgtgttgccttttccctttctacctgatctgttaccttttccatttccaattcattctctgggatacctacacctggctgcactgttacttgtctttttcaaaacctttttttttaaatttaacaaagtggatggaaaagcgctaaaggcaatttagcttgccccatatttgcctgataaagcctgagtctctgaaaatctgccccctttcgcaagactttaagtgccaggaaacgaggcgatttcagtgacttctcttcttccctggctcctggctcaaaaacctgccactgccttctgtgcgtccaattttcaaacatggctgccgtcaggagccacggctatgggcgcggccattttacagagtaggaaatgccgtaaatgcgcttgtccttgctcttttaaacattttaggttctcctcggccgccgtaggtggaccataaacccgtgcgaggactccagaagtaggagcagtttacggaagtgtaacgttgaggcccttcttgtgtatctggagaaaatagaggtcagtgtgtggttttgtccctgaaagttttttgtcctagttcaggttttgtctcagtggaaggtttgggagatctgaggacgtggtgtaccctggaccacatagtttttggcaggaagactggggagcgccggggtataggcatttgggaggtacctggtgggagtctgtgatccccctgtctgtggtccgcgtgcctttggtgtgagtacagtgactaagggtctgtagtgatcaacggccgtgtcctaactgtcaaggtatggatcactctgcttgtaaaggatggaggtggcgattaggatcgatgcggcgtctgcttcgggttcaggatttaatttggaactcagtgatgttggagtctgggaggatgtccatcgctgtagagtgtctggtccgtggttcggatgagtaagaggcatggggccagtgtctgtggtacaaaggcttgtgagggctgaagctttcgagactttggagccctgggtcctgggttgaggttcgaacctcggttactggggcaaaaggcgacacagcccccagcattagttcgaaaccatatatctactcttctgatccttggggtggctatttacagatcggggggtcaagttcagtcataccctccgattatatattgtctatggctgcaaaggcagcggttgagttgttgtgacagagacctcgtggccggcaaaatcgaaaatgttgccaacctctgcattcacttcttttattttttatttattttttttattttttgagacggagtttcacttttgtctcccagactggagtgcaatggcgcgatctcggctcactgcaatctccgcctcccgggttcaagcgattctcctgcctcagcctcctgagtagctgggactacaggcccacgccaccacgcccggctagtttttgtatttttagtagagacagggttttaccacgttgggcaggttggtctcgaactcctgacctcaggtgatccgcccaccttggctttccaaagtgctgggattacaggcgtgagccaccgcgcccggccttcacttcttaatatatagtgagtgttgcttgcccgccttatattcacactttcttaacagaatctccatttcgtgaagtattcatccctgtggcaaggcgacccaaatcccagtttcttagtaaggccttgttggtcttagccaatcttgctggttccaattgccattgctagtgataggtttgacatggaaatgagcttaggcgtatggtgcaattctagccaactatgtatgtgaaaatctgcctgggagtttctgagggagcrttttcttttttaaatatgtaatttcttgaatctctttttccatgttcgtgatgatatcgcctgaaaataacattaattttctgtcttactttgtaatgcttataattcattcttatcttaatgcattggctcaactttccagtataaagtaggaaaatagggtgttagtggacgttcttgttttattacccacctgtaaaattcacccgttgtgttgtctggagttaacacctttcctggaggtaaactgtttggtatggttgatctcttcctttactttgttaatttttctacatttatatattttaaatgtacaatttaattatcatggaggcaatatatgtataagcagtcattgcccaggtcaagaaatagaatatggtcagcacaccagtggtgttctgtgagtctttttccattctcacaccgaaaagtattttaggcttttctttatataattaatcattatttatcattgtagttaatacagttttgcctattttaaactctgtatatcagtggaattgtacatcactctttttttgtgtcagccttcttttgctcattattggtgagggtctttcctgttgcatctgagtatattttctttgctcaatgacaaggatcaggcgaatttacagtaaatattttagggcttgcaggctacatatggtctcttgcatatgctaatttgctttttgttttacagtctttcaaaaatgtaaaaagcattcttgcaggctggaccaaaggtataataggttttctatcacattccattatgtaaaatatagcagttttttctattattaattacatttgtattacctaaagcttgtattattaagaataatgcatgtgtgaaaatttgtgtaaatgtcttttggttcatatgtgctctcatatgggggaggcagagatgtatatctagaygtgcacctcggaggaaaattgctgcttcatagagtgtgtataaactccgtctaaatagatgtcaaactgttttctaaagtggttgtaccacttacagttcccctagcaggatatagtttgctttatagggtgctttatgtggcctctttaaaatatctggccataccctaataacattgagagattctcctatattaatgttctttaaagctttattgatatgtttctaccattgaaattgacagttgattctaaaatggtttttgtgtatgttgtgaggggggttttaactttctgtccccatccccagtaccatttattgatttttttttttttttttaatttttttagatagagtcttgctctcgtcgcccaggctggagtgtagtggcgtgcttggctcaactgcaacctctgccttctgggctcaagtgattcttgtgccacggcctcccgagtagctggaattaccagcaggtgccaccttgcctggctaatttttgtatttttagtagagatggggtttcaccatgatggccaggctggtctccaactctggctcaagtggtccacctgcctgaagggggcctgcccctccacacctgtgggtattttttgcaaggtggaaatgagagactgagaaaagaaatcagacacagagagaaagtacagaggaagaaaagtgggcccaggggactggtgttcagcatatgggggacccacaccggcactggtctctgagttttgttagtatttattgattactatttttaccatcttggtgaggggggtgtggcaggactatagggtaatggtggggagagggtcagtaggaaaacatgtgagtaaaggactctgtgttataaataagtttaaggaaaggtcctgtgccttgatgtgtacgtaggccagatttatgtttgactttacacaaacatcttagtgtagtaaagagtagtattgccgccagtatgtctcacctttagttataaggtggttttctcctatcttagtaaatagaatgtatgattgggttttataccgggacattccattcccagggaggagcaggagacagatggctttctcttattttaactgtaaagaggtcttcctctttcactaatcctcctcagcacagaccctttacgagtgttgggctgggagatggtcaggtttttcccttcccacgagaccatatctcaggctgtatcagtgggaggaaaccttggacaatacccaggctttcttgggcagaggtccctgcggccttccgcagtgcattgtgtccctgggtacttgagactggagaatggtgatgacttttaccaagcatactgcctgcaaacacattttaacaaagcacgtcctgcacagccctaaatccattaaaccttgagccaacacagcacacgtttytgagcacagggttggggctagggttacagattaacagtatctcaagacagaggaacttttctttgtacagattaaaatggagtttcttatgtcttcctctttctatatagacacagtaacagtctgatctctctttcccccacaccttcctcagcttcccaaagtgctaggattacaggcgtgagccacggcgcccttagttccatttattgaaaagacagcttttatctacttccctgtagtgctatcattgccattgagtctctatatgtgcttaattctgcttataaggattttattctgttcctttgtcctatttgcctgttattgtactaatattgtgctgtcctaattaaagtagctttataagtcctcataactgatatggcaagtcttctaacttttttttcaaactttaaaaaaaagtttatagctatttaaacttttcagtatcagtttgggattrtgactgtgatttcattgaatctgtagatttgggagacttgacatttttaaaatgctttgttttccagcccatctttatagtacatctttgcatttatttaaaactgttaaaatttatctcagtaaatctaattttaaaaatatattcgagttcttctaaatgatatcgtttatgtcagcctaaaagaggaaactgcacaaaatacaattttaaagagtttacttgagccaaaatgaggacagctgcctgggaaaatactttcaggttgccttggttaagtgctctgttaggattttgttagaaacaggttttaaagtcaaaagggaacaaaccgtgagctgacataaagttgtttggcaagaattctcattggtttacagaaataatatcaattaacaattggctgtacattgttaactatggggttttatgagttaggatgtccagtgaatggcattttatggctactcagtgtgagttagtctagagcctacatagcaagtggctttaagagataattatttagcttgagggggaaatgagatgtgactattgtcacattaaattttttttttagtttttaattttttcttttttctttttttcaggggaacccctatcagaaagactgctgtcacattttaatgcctctctagacctgataatttaaagggagtcacattcctcagataaaagattcatttctttctcatttataaattttattttgtttgttgatggtctgttctgtcagttactaggaaaggtctgttaaagtctttagtctgaattttctatttcttgtttttggttctattttttgctgtatacatttcaagactgttgttaggggtatacatatggtgtatttctatgaatgaagagccaaatttcacctcttttcagtgagcattgtttctctttctctctgttaattctttaggatttctggtcagttttgtctgagatatagttataacagattatctttggttactctctctgtggcatattgtctccaaccttttattctcaagcttcccatatcattttggttcagacatatcaactataataaccgcatgtggggaggctgaggcgggtgtgtgatgagatccggagttgaaggccagcctgaccaagatgctgaratccgatctctactaaaaatacaaaaatcagccaggcgcggtggcgggccgtaacccacatggacccatgggactgcacaaatgggggtgaacgtgggaataaagacaggagacaaaagagtatatttgggagaaggggtcagggagcaccttacctctagtggacaagggccctgagctttacacagccctccgtatttattaggcaaaagagataggagggtgggggggtggaagaaggggtcggctgctcagttcagagtaggcttgcaagactgcattctctagatgtcgcagtagataacctcggtgccagggagtgattgcctccagcaaaccttatgttggcaggagcagtcctgagtttgctcacrtcctgtattcatgataaacagtttgctgtttgatcatatagcctccagcagaatgctgagttggtcacgtcccacaggcctttggctccctgcatatccccctttctgtttatgtattaattgaaagaatgtaaggctgggctgggmrgctctcattctccaattggtggtccatccgattttacagactataaaccgaagacagagacaaaacaacattattccaagaactacatataagatgttaatgtggtgccttagataggtccaagggttgaggctctccaggccttcctggaattcggtccartcttctaaagaaggctgaaattcttgagtttgcctatttaaatcaataattttgttttgtaattcaccaatatcaaaggtgatgttggatgtgaaagctccttgcaaatgggctttcacaaggtcccacggatactcactttggttatattctgagttagttacgcaaatatgaatgtgattaaaatgatgacgcaattgctgctgcaactgcaagctttgtacctgttctcctaaccacagaaccatggatttcaacattgccacttcagtttgtaactcagtgttaattttattctgaagtagcctcgcttggtcagctgtgcgtgtccagttctccacctactgagatgtttgaatagaattatgcagagttacagaagatatcacaacagaagttattagtttgaccaaggaaacaatagcaaaaattatgcctaaggctctatggacacagtgagtaagstgagttagaagaagtgttacaaaaatgcaaagcaggtgtggcagcccaaggctcagacagattaacaagaatccatagcccagggatgcaacccaacattatcaaagtagagatattatgtgttcgtaatgtgctatgattaatgcagtgtgatataactggcaagatttacaggtcaattgggtattgtttacctgaagctggttcttcttagctgccaaaaaggcataaggattaaaaacacaaactgtaaactgagtggtgatattctttacaaatgcaacattaagactgtgttgcttactattgctattattagacagtgttccaatccagatgttgccattcataaatgggagtgctgccttccatatagtttcttgaattggtcctttcctccccagataatgcaactgaggaagaggtgggctaaagcctgctccatgccaagcaatctgagcagcagactgggattggattctgctgttgtataaagaagaagcattaaaagcttgccgccaatgccagtgaagtttgtgccatgatttctgactttcaccttttccatctaattgacctttaggttcccaatccacagtgtcttcagttgacatatattgtttactagccagtggatcaagacactgggtccacagagtggggtaggaactattgaatggaatccattctgtataatcagcacaattagggtgactggactgggaatgattggttagcacaccagttacattaatagaaccaagacctaataagtacataatttttccatagtgactcaaccatgtttgagcttgaattgcaagacagctatggctgagcgacgtctttgtggtgataaacaaagggagtccttccagtggagtggtataattaatgacattgttctgagagtctaacttttctatgtcacggggagttaggggtcctggagcccactctccctgatcgtgataaatctcaggaggagtgagctccaaagtataggccatactgctgggggattgggaacatatgcccaatatgtttttgcctgtgcacagggaaaacgtagtgcacaggacattatggctaacatggccaagagcatggaatcaggggttttgcctgtccctgacactccagtagtttctcagcttcctgtgtggttttcttgagttgtccccaggttatgggggttgatgtcatcatgactctggttggccttctctccatctttgcactcaggctcagctgactcatagctcgtacaggagggactgggcccatggttggccaccctgggttcctccagtctcccattccatggtcgcatgcaccttgagggcacccacatggcttgtcccatctcctgtaaacacacaagcataccctcttccccaggtcagtaaatctaccgggcctttccattgttgtccttctggggatttccataacactttcagataaactttgcttttttcctctaacacttgccaatgtctttctgctggagtcttaccatccataccgggagtcagaaaatttaaagtaaataaggctaaatgtagttttgattgaggtggtagttggcctcctataccccctttttgttttttcaacatgcgttgtaatgtttgatgtgcccatcctatagatatgactgacacatcagctcccatgtccataagcccataaaatttctttcctttaatgtgtactacacaggtaggtctattagaggctatgggttgggaaagatagatttcccatgtagttgtgctcccaaaccctttatttcctcatttctcttttcatggggaagggtgtaattcacagggaataagcaataattgagcaatatattctcccagttcaaaaacccaaagattttgtgacattaaaactacttgaatttctccttcataatcggagtcagtcattcctaggactacagtgatgccttgcaagttaaggcagcttttacctaaaattagtcctgtgtatcctgtcggtaaaggtccccaaatacccaaataggtttgtctcccctaactaatgtgattctttctctggtgggtagatctaatcctgcacttcctggtgttcctgggttgagggaatcaatgtgcctccaggaacccatccctgaagtggggttgtggtctgcattgggaatgccctcattgtttgaggggcccgggtgcaggcccccatctcatttaccaatggggtgccattctgatgaaattttgagcagcactgggtagcccagtgatttcctttgttatggcgagtacagagtcctgctgttttttctgctagggagtgaactgcattgtaatatcctttctgtcctgagatctggcggcattccttttttagatgtccagtttttccacaattacaacattttcccactttagggtttgacccttggctccttttagatttgtcaactgctaaattagccattgcttatgctaactttgcagatcgatgaatctcagttcctacatcctgacaagctctgagaaaatttcccaagttttttgtacacctcactggtgccagtgcacgtttacagtacacgtttgcattctcaaaagctaaagttaaggttagcatttctgcagccacagtatgaggaatctgacgcttcagtgcctcatgtaatcttgcaagaaattgtgcatagggttcctgcaacccttgcatgatatgtaaaaaggattgtacagggactccctcttcaggattgtggcccaggcgcatttagcggcctgtgtacactgctgataagcagcatctgggagtgccatttgacgttctacatctgaataagggccatgacctaacagcatatcctctgtaatgtctccgtgtccagcagcatggttctgtttagcctggtctgcacacatttcttgccaatttaaattccatgtcagatatgcactagcagacaagcaagttcgygccaagtgtctcacatcaaagggtaaaaaacgcatagcaccaaacacagattctagcaatcctaaggtgaatgggctctgtatgccatcatttaccactcttgcttttaattccttcaacaacttaaactctagtggggtgtgttcatgaataacctgctgtggattttttggatcaggcctgatggaaataggaaaagcacaatgtcctaagggctctccagctatggcagcagagcattaaattctttgtattaggrtttctatttctgccaccgaaggaggcagtacagatgtttctgcaactgaaggaggcagtataggccaatttttatcctccctctcctgttttttatttttaattggagctgtgggtgggtcaacaaattctttcagatttttagattcagcttgctgtcctgcagaataataatgagataatggcagaagtacagtacgaactaaactccaagtggagaaaacagaagaatcgactttaagacctttttgatgagcctgttttaatccttctcctgctgtatcccaattttccacatcaagagtgcctgcctgtggaaacsatgggttatgtgtaataaccttttgtggcttctgcaggaggttagtgtctgygaattaacctgagctgcagactgtctcaacagaactttaagcaactgcacataatgtttttcttcaatagacaaattctttcccttgttaccctgagtcagaaaacttcccagtacttctttaaagcactgctcccagtacctctttagggcactgaccttatatctgctgccggcagactcttcccagggtcccctttcrccttgtcaatttcagttcctctgctccagcagaccttcttcattcacgtccttgaagtcccatgtttggatgctgctagttgggcgtgcttggagtccctgttctggttgccatttgtaacctgcacggacctaggtggactaaacaaagkggggtgaacacgggaataaagatgagacaaaagagtgtatttggaagaagggatcgggggcgctttgcctctaggggacaagggccctgagctttacacagcccttcatatttattaggcaaaagagacagtgagaaggggaggtggaagaaggggtcagctgctcggtccagagtagtcttgcaagactgcattctctagatgtcgcagtagataacggcgccaggggtccagagtagtcttgcaagactgcattctctagatgtcgcagtagataacggcgccaggggtccagagtagtcttgcaagactgcattctctagatgtcgcagtagataacggcgccagggagtgattgcctccagcaaaccttcatcagccggagcagtcatgagtttgctgacatcctgcattcatgataaacagtttgctgtttgatctgtagcctccagtggaatgctgagttggtcacgtcccacgggccacgagccttcggctccctgcagcaggtgcctgtaaactcagctactcgggaggctaaggcagagaattgcttgaacccgggaggccgagatcacaccattgcactccagcctgggcgacagagtgagactccatctcaaaaattaaaataaaataaaataaaccccagatgttattggattttaatttttaatccattctgacagttttgaggcatttatatttaatgtaattaactgggatccatgctctgtttttacttagcataaaatacttaatgtaatgtaattttcttagtacattttattttaaaacagctatctaaatgcattgtatttgctctttttgctctgtttttgattctcttcttttggatgaatttcttgttattacatttcccccttttgttggcatggaacttacgtactttaaaacaattactagtttttttttttttttttttttttaagacgaggtttcgctctttttgaccagactggagtacaatggcacaggcttgtctcactgcaacctccatctcccggattcaagcaattcttctgcctcagcttctggaataactgtatttttatagagatggggtttcaccatgttggctaggccggtctcggactcctgatgtcaggtgatccrcccgcctcggcatcccaaagtgctgggattacaggcgtgagccactgtgcctggacttactagtgttaattgtaactagagattacatgtagtgtgcaacctttgtcatattcttctgctaattggcacttttccattctacagaaaccttagagcacgtcaactttattcaccacctaattatccagtaaattattgtgtattttagctttttatgtatttaaaacctcctaaaatattgtcagtactgtttttatgacaatgcttatgatttgcccagtacattggctttcaaactgaagtacatgtcttcacagggtgtatgtacaaagacttttgaagaggtgtgggagcacacatgatttaaaggaaaacaaagaccaggtcctctccttgctgattgtctcttttctaaaactaatctgcctaagagttcaccatctcctgaggctggtgctatggtgggtctcatttcctacctgccttcacagtcyttccacggaaacgtcacagagsaaaggcatacctccaccacattaagaatcctagacattattggccacaggtataaaatccgctggggctccaaacaaaggtatatagttaactatattgggggcattgctttaagatgagtgcctagcagcagtgacagtatctgggcctggaaaaaatgtaccacttacattgaatttgctcttcaacccacaggttctgactcctcaggagcaaaaaacataacctgaagagggaggaagtggatttggggttcaccatttcttggggcacacttgattgaaaactgagacttctgaagagaaggccagaagatacaaagacagaccatcccagttgaatgctgtcttccaagaacagaagaaaatgatccaggcccaggtaactgacttttggtttgttttattctttcctttgttccataatagatttgtagaagcctataaacatcaatttcactaatataaaaagtakaaatttcaaaaagcaggatctggagagaagtaagcttagtttttaaactcaatatcatgcaaaatagtaggataaggaatataatgttcatwgcattaacactaaattatgaattttgtgacaccatgcatggctggaggatcctgtggattatattagctgtcagcttgcatctaatatctctgacagccaatgtcacaagaaaatcataatttacatggtatgtcctgtttttgaagataaaacagattacttcctgggggttgccattatttcatggcactttggtctcaggaaatttcttcagtggttcttcctagagttgatgtggtggatggtgtccagaatagcagccttctcataaattcagatgcaggtttcctgtggctgtttcttgaaggactccttatatactgttacggaatagactaagcaaacagtaaacacagggaccaacacaagttaatttcagccttgtggcagtctggatttaacttggaataaaacctagacatcctgggaatatggcaggattccaggactttcaaatggttctcaatgaacagatagctgaactggtgtttgaatatagatttggagacagggagttgaaagtgatattgtctgaacaggacttggattggagtttacagatttcctttagactttcaccttgtagaaaatgccaagtccttattgtatagtaaataattgaacaaagggagttttggcctttgtgttcaagctaatggagggtgagctctgggcttctggaatatcttgctaatggtagtgtctttgtttgcttgggtcctttggccactggacagcctaaaaatacgaactatgatagatctgtgatctatgataggccagaaacttccagaactagaggctaaagttaaaacctgacttctgggagggtgtggacctaagatcagccacataggtcatctgtgattgtgtcccagtaaagtaagaaagtacacatatcaaaaaataaatttcggctgggcgcggtggctcatggctgtaatccagcactttgggagaccgaggtgggtggatcacgaggtctggagatcgagaccatcctggctcacaccgtgaaaccctgtctctactaaaaatacaaaaaattggtcgggtgtggtggcaggtgcctgtagtcccagctactcgggaggctgaggcaggagaatggcgtgaacccaggagacggaaattgcagtgagccgaaatggtgccactgcactccagcctgggtgacagagagactccatctcaaaaaaaaaaaaaaaaaaagtttctggctgagtgcagtggcttatgcctactttgggaggcttaggcaggaggattccttgagcccaggagtttgagactagcctgggcaatctagtgagaccttgtctatatttartaaaattgaagaaaagagaaaaagttttcttttcacatattttcttcctaatccacttctgtaaatggttggtaatatttacttcctgtcactgtatctgtttgtggatcyatgtctatatatgtattaataaaagtgtgagtatatatgaatctatctgtagatatatatatycattatgatatacacatatatatattttacatgatagaatcatatttcaaagaacatagcagccaacttgaagggactcttcattggccgaagatgctacactttgaacatccaaagaccaatgattgcaaatgattgaagaacattaattatataaaattccatcagtttatagctatacttgaaaaaaatgcatttgtcaccattgggggttaggagagaatcaagtatttaatctgaaaaatgataaaagatcataaaggttttgtgtgtgtgtgtgtggcgggggtgggttgactatgagtttattttttacttttacttttctgctttttttctttyttccttttttttttttttttaattgagatggggtcttgtcatgttgcccaggctgctcttgaactcctgggctcaagcaatcctcctgcctcccaaagtgctgggattacaggcataagccattgtgcctggccctcttggtaattttgtattactgacccatactctgctccttggctataaattcccacttgcttatgctgatatttggagttaagtccattcaccctctaccactgcaaaatcccattacatttgtctatatacctgtcataatggccctgaataaagtcttccttactgtgctttaacaattctcattgaataatttttttaaacatgtatagcttaattaaggaggtgagattccaacgcctttgccatattctgaatagaggtaagtcactaggccagtccctgctcaaggagagggtgtagagcacccaattctgtccctgtttgggcgccacttgtaacccgcacagacctagggggactgaacacagtggggtgaacacaggaataaaagacaagagacaaaagtatattcggaggaaggggtcagggggtaccttgcctctagtggacaagggccctgagctttacacagccctctgcatttattaggcaaaagagatagttgggggggtgcagtggaagtaggggtcagctgctcagtccagaggaggcttgcaagactacattctctaaatgttgcagtagataacctcagcaccagggagtgattgcctccagaaaaccttctgtcggcaggagcaatggtgagtttgctcacatcctgcattcatgataaacagtttgctgtttgatcatatagcctccagtggaatgctgagttggtcacgtcccacggacctttggctccctgtaagtgggaactacataaaggtgtgaacactgggagggtggagttcattgagccatcaaatctgcctgccatagatctgtcatatagtaaactatttttgagtgtggattgaggtaagactttcactttacttttttccaaatagatagctatctcacataaataatttagaatgggtaaaccaaccaggattaagtacttgtatcatctaccaagtgtgttcactggcctctgtaataaaatgagtatagagtgtaccttctgctgttccctgggtcttcaatgactcaatttcccaccagcagtatcctttaaagccatcctgcatcctgagacaagagattgacaattcattgataagtagtcttaattgtcactattacagggctgtaggtcctttgccagccatgcctttcagtcctaaatggtcttcaaggttgggctgtgttgtccaagagctgaggaccttacatttattgttccaatatttattggctataatgatttctgtggagcagtcagctgtcagaaaattttgtctcctttgtaggtaacctgtcattggtctttggatttttttatagtctccctttgtatctggtgtaatttagtttcaatctgttgtgcctacgtgtagacttcttgcttgaaaagttgttggatttcttgagtttgaattttggagtgtttaatcagttctgaaaaattttcagtgttagatctttggatattgtttctccattacttgattttctccttcttcttgagaaattatcaaactcaaggaggtcataggaaccctcagtttataattagtccatcagaaaaataggaggcctggatttgtgatatatggttggccctccatatccatggcttccacatccatggattcaaccaactgaggattgaaaatatatattttttaagcatctgaactgagcacatacagacttttttattgtcatgattccctaaacaatatagtataacaactgttaacataccatttacattgtattagatattataagtaatctaaagataatttaaagtatatggggctgggcacggtggctcactcctgtaactccagcactttgggaggctgaggtgggtggatcgtctaaggtcaggagtttgagaacagcctggccaacatagtgaaaccccatctctactaaaaatacaaaaaattagctggttgtggtggcgggcacctgtaatcctagctactcgggaggctgaggcaggagaatcgcttgaacctgggaggcggaggttgcagtgagccaagattgtaccattgcactccagcctgggaaagaggagcaaaactccgtctcaaaaaaaaaaaaaaaaaaattagccaggcgtagtgtcacatgcctgtagtcctagctacttgggaggctggggcagaagaattgcctgctcctgggaggcggaggttgcagtgagctgagattatgccactgcaccccagcctgggaaagagagtgagtctccatttcaaaaaaacagaaatgtatatgggaggatgtgcatgggttacatgcaaatctgcaagtactattccattttattttattttattagagacagtcttgctctgttgcttaggctgcagtgcagtagcatggtcataactcagtgtagtctctaactcctaggctcaaatgagcctcctgcctcagcctcccaagtagctgggaccacaggcactcaccactgtgcctagctaattttttaattttttgtacagatggggtctcatgttgcccaggctggtcttgaactcctgggctcragtgaccctcctgccttggcctccgaaagtgctgggattacaggtgtgatctactgtgcctgaccaatactgtgccattttatatcagacacctcagtatcctcaggaggtcctggaaccaataccctacagatactaaaggatggctgtatatatgtctttcatttgcatgtatctaaaataaatatatgtacatatattcatatatatttacatatataaaatgtataaatatattgtttttaggttagcaagatttaacttctacactttatagaaacttccaattgggtgaatggaggatgactgaatatacagttacagaatattatattaggactttacttcttccacattgtattaaaaaaaaaactatttggtatatgcacacagcctgtagagtggaaatgagcagaaaaactttagcatttcttccacatcatcaaaaagacatcactttattaaacaggactgttattacaggaatccataacactggaggatgtggctgtggacttcacttgggaggagtggcaactcctgggcgctgctcagaaggacctgtaccgggaygtgatgttggagaactacagcaacctggtggcagtgggtgaggacagctgccctgtgtcactcagagggtgcctagtcagtggccttcctttctcagatgcctacctctttggaatgcctgcagtactctgaagtggtagattctcagatccttctcttgctcccacacaagacggtgtaatctaccctcttgtaagagaaaaaccttgatgttacagatatgaaaygaaactttcatagtttcagataagaaactaaattttgggtattttaagaaactcaagtttcttgaaatgtaacattcttccttcttgacattgccagcccaatttgatatgtctaagtcctctatcattttccatgaacagggtatcaagccagcaaaccggatgcactcttcaagttggaacaaggagaacaacygtggacaattgaagatggaatccacagtggagcctgttcaggtgagagaacccacaagrcagaaggctatggaagtcacattctagwcagtcagagaaggcarcacagctgtgaagggggtttgaggatatgtaaacagttcctctactcatctgtctcccagtgtgagaccagtttttctttgtaggaatttagagttaaaaaaaaacaaaacaaaacaaaaactctttatctcctcagagatctgattattttatctacatattgtttgtttgcctgcataattttcttcttcctcgggtttcaartatttcccttcttcatgttgttccacctctcttgttacgaaattccaccttccaggcctctttccaaagaggaaactttgaagtcctcactgttttcggactcccacccctttgtgccccttggctaatgctgacctcccctcctaacacctcccctgtgwtggatgtggcttcctcagggtaaactggactttcgctgtgccttggcttccttcgcttctctttttccttattcttaggttctccaaaggtcccgttctccattttctcatctgtgcccttcactcttcaaaattgccttcattctagtaagtttaaactccttccgctccctggaggagagtcccaaactgacatctccctgttgttatctaacacagattttagttctgtgtaatttacttcatggcaactctcccctgagttcctagtaactgcaaggaactagaatcatctttcctccaagaaaaccattaagtttggattttcgtttgttcctgtacatcctgaatcttggccatctgggtattacctgcctgaagagctctcttctttaaaggtctctgctagtcatgatgcatctctaagtaaaaaagtcatttttttaacatcctacattctcaactcccgcctacttccatttggttcctttctgtatttaataatttgctttcgtttttttccccatcgtattctgatgacaccaagtcccagtaaaccatgttacctgtcaaatttctcatttcagtgatctctgtgatataataccatcttgctcacaaagagatttccatcctctttcctaaaccctgcctggtgtgttccacacatatgattacttccctgactcattcccttaaaaattattcattattattatttatttttattaatttattttttttttaagacagagtcttgctctgtgcccaggctggagcgcaatggtgtgaacttggctcaccgcaacctccacctcctggattcaagcgattcttgtgcctatccccaacaccagcaccatacctggcacacggtgatcattcagtaagagtatgtggaatgaatgaatctgttctttggacgaaatgggcctccagcctctggtctgctggtcacagtgaattgcttgtattttaaggtctgttttgcaaggcacatttagaaagcagccaaatctgtctttattattagtgatctaaccttgttttatgctaactgctttcaccttttagtttgtttatactattactttttgccaatgtgcaaggaacattaaacatggagttttatttacactcaggtcatagggttattactaagagacacctcacatcaaggcattaaaaaaaagaatactttggggccgggtgcagcggctcacacctgtaatcccagaactttgggagactgaagcgggcagatcacctgaggtcgggagttcgagatcagcctggctaacatggtgaaacgccgtctctactaaatatacagaattagctgggtgcggtggtgcatgcctgtaatcccagctactcgggaggctgaggcaggagaatcgcttgaactcaggaggtggaggttgcagtgagccgggatcatgtcactgcactccagcctgggctacagagtgagactccgtccccaaaaaacaaaaaaaaaacaacaaaaaatactttggctgtgagccgggattgtaccactgcactccagcctgggcgacagagtgagactccgtctcccaaaaacaaaacaaaacaaaaaatactttggctgagcacaatggctcacctgaggtcaggagttcgagaccagcctggccaacatggtgagaccccgtctgtagtaaaactacaaaaattagccgggcatggtagcaggcacctgtaatcccagcaacttgggaggctgaggcaggagaatcccttgaacccgggaagcagaggttgcagtgagctgagatcgcagcattgcactccagcctggacaacggagtaaaactccatcttaaaaaaaaaaacaaaaaaaacaaaaaaaccacaacaaacttttaccccaaatctaaatgatagaaatctttgttcttttctttctagacatatggaaagttgatcatgtgctggagcgcttgcagagtgaaagcctggtgaacagaaggaaaccatgtcatgaacatgatgcatttgaaaatattgttcattgcagcaaaagtcagtttctgttagggcaaaatcatgatatatttgacttaygtggaaaaagtttgaaatccaatttaactttagttaaccagagcaaaggctatgaaataaagaactctgttgagtttactggaaatggggactcctttcttcatgctaaccatgaacgacttcatactgcaattaaattccctgcaagtcaaaaactcatcagcactaagtcccaattcatcagtcccaagcatcagaaaacacgaaaattagagaagcatcatgtgtgcagtgaatgtgggaaagccttcatcaagaagtcttggctaactgatcaccaggtaatgcatacaggagagaaaccccacagatgyagtctatgtgagaaagccttctccagaaagttcatgcttactgaacatcagcgaactcatacaggagaaaaaccttatgaatgccctgaatgtggcaaagcctttctcaagaaatcacggctcaacatacatcagaaaacacataccggagagaaaccctatatatgcagtgaatgtggaaaaggcttcatccagaaaggaaatctcattgtacaccagcgaattcatacaggtgagaaaccttatatatgcaatgaatgtggaaaaggcttcattcagaagacgtgtctcatagcacatcagagatttcacacaggaaagacgccctttgtgtgcagtgaatgtggaaaatcctgttctcagaaatcaggtctcattaaacatcaaagaattcacacaggagagaaaccmtttgaatgtagtgaatgtgggaaagcctttagcacaaagcaaaagctcattgtccatcaaaggactcatacaggagagagaccctatggctgtaacragtgtgggaaagcgtttgcgtatatgtcgtgtctggttaagcataagagaatacacacaagggagaaacaagaggcagccaaggtggaaaatcctcctgcagagaggcacagctcattacacaccagtgatgtcatgcaggagaaaaactctgctaacggggcgactacacaagtgccttctgtggcccctcagacatcattaaacatcagyggcctcctcgcaaacaggaacgtagtccttgtgggacagccagtggtcagatgtgcagcctcaggagataacagwggatttgcacaggacagaaaccttgtgaatgcagtgaatgtggttgtgccttccgtgatcaattatgtcttattttatgttacagaaaacccataggaagaaaactcagatctatgtggaaaagggttgagcaaaaatttgtagttcattatgtggccgaaaagcatayactgagagaacatgtataaggctgagatagcctgataaactcatcctattaaaatgtatgctgtgatacacaggcaaatttgatgttaacctaagcacatacacagcaattgctcgactgtgtcaattaaatgagtaaaggaagcccaagtacttttaagtggaggaaatgaagtactgtgaatttttaaaacagatgagataattggtgtygggagtgttgcagtgactgaaaagcttcataaggggcagttggtgggaaagggctaatactgtaatggtggaatgtgggacacatatgtgtcaattcagtttccttagaccagtgccagtgtggaggattaattgaaaaccaggaccataaactttcagaactttgtattatgcagagggatctgtgaaactagtcaatttgtttcattaaacaaatattttaaaattatttcctttgtaccttgtcctgttccaggagctgaggtcaaagaagaaaaagtttgtggtctcctggagagtttgtggggttaattttaagtggtatcattacactcaggcaatctagtcaggcggtgcaaatatctacattaggtgaaatggacatggagtaactgtgtccaggggacgcgataatttattgttcaaggagtagcagaaggactgctgttaatggtacttaagcaccttagtacaaaaaggagggctttttgtttgtttgtttttgcccgtgtcttatctctccaagagattacaaattccctgctaagttttgtagctacttaaattttagaattaaagaaactgaacacaaaatttaaaaattcagttccctcactgctcaagagctgtatatgtgagtagaggctactaaactggacagcagagtgaacagaactttcagacaatgaggactctttgtcattatttccaacatcccagaaagttatgctggagaggctgctttgcatgatctaatatttcccaacacatagaaaaacaaaaactaattatgtattgatttggagagagaatgatttggaaagagaagcgtattttgtcattgaagggaatgacagttgtaaagaatagaattgtcactcacaacttttgtgtgattagaaagacttagccaaatataaaaggggcagagcagaaaaggaaaaggactcttagaataagtagaacacaaaggaggaggaaaatcttagtctctgagaatggatgagactgtaacagatgggaggaggtgggtttcttttgggacgtcttagagatgacgcttttatttgtccataagacctatcacccgctagggttaccatttcagagatcccagcttctctgtgacctgctgaactgagatgtgatttttcttttcttttttttttttttgagacatgatttatcttcatcattctcacttttctgggagtaggtctcttggccttctttatctggttttttaaccttcatcccatatggatacactgtccaagttacagtaagtgctgctcataggaaaataaatggaaatttgccttgtggctaggtcagaattcaacagaaatcctgggttactaggtaaccttttttttgagatggagccttgctctgtcgcccaggatggaatgcagtggcacgaactcagctcactgcaaactttgcctcccgggatcaagcgattctcctgccttagcctcccgagtagctgggattacaggtgcctgccaccacgcccagctaattttttgtatttgtagtagagatggactttcaccatgtttgccaggctggtctcaaactcctgacctcgtgattcacccacttcggcctcccaaatgctgggattacaggcatgagccactgcgcctggccactaagtaacttttatatatcatcactgtgcaaggcactgttttagatacagtaggatggatcggtgaacaatacaggcaaaggaataacctttataaactttaccattgagtgaggcagagaaacagattgtacgatgttaggaaggagaaaaagactagtagtggatactaatgcatacgtagtgatgggggcttttaaaaatatgttattttttttctccaagggaaggcttttctggatgtaatttgagccaagacctaagtgtactgaggagagcctgttacagcatttgtaagcacagaatactccaggagtatttgtaattgtctgtgagcttcttgccgcaagtctctcagaaatttaaaaagatgcaaatccctgagtcacccctagacttcctaaaccagatcctctggggctggaacctggcactctgcatttgtaatgagggctttctggtgcacacctaattttgtgcatctttgccctaaatcctggattagtgccccatcattacccccacattataatgggatagattcagagcagatactctccagcaaagaatcagaaatgggcgctccaccaaccaggccctatccacatctggcctttgtgaatctgcacatccttccatggtaaggtcaggttgcttatgctctatcagggtctaaggatgagttggccaggcctaccctgagcaattgcttaacgtacctttcagagcttgacctcccagatgaaggaggctcagtgcatacctaagcttggtacacatcatgtctgctcccaaacccaagatccttatagtttcactgaagatcacccttcatctgctcccatgacctcagtccctcctgggccaagaggcagtcctgcatagtgatttggaatgtatcctgaagtcacactgcttagtttgaatcctgccctgccatgcccaagccatgtgccatagagcaactaatttaccaaggtcttgactttagctttaaaatatctgcctcaggtttgttgtgagaagtaaatgtaaagtccttaaaacagtgtctagcaagaaacacaattaatacaagtaatgttattagtcccagtgaggggaagaggaggaatcaagagtataggtgtgcctgaacttaatcaaaactgtgacttgatgacaaaaaggttgccacgcactgagccaaggattcctcatatagcatactttttaagcttaatagagctgtgattatgaaactctctagctttaaactttgaaacttgcaatgactgttctgcttggggtctggacaatggcaaacatccttaaaatggccatcaagtctgcatgttccggttctttcttccctctcccatactccaccttgctctccctgttctgacacactggccctcttttggcccctcatatgctgctgacatcctttcatcaccttcaggcctctgtgcatgctctttcttctgcctgaacttttctttccccccattttctgcatttttcctccttcaggatcttcaaacatcactaattcagagcaactttccctcaccagtctggccttccataggatcgtgttcctcttcttcctagcacttaggggaactgcagtttaacattttgtagatttccatgtgcattccccatctggattctaaacttcctgaaggcagagagtgtggggaaaagaaagagagatcagactgttactgtgtctatgaagaaagtagacataaggaactccattttgttctgtactaagaaattcttctgccttgagatgctgttaatctgtaaccctagccccaaccttgtgctcacagaaacatgtgctgtgttgactcaaggtttaatggatttagggctgtgcaggatgtgctttgttaaaatgtgtttgcaggcagtatgcttggtaaaagtcatcaccattccccagtctcgagtacccagggacacaatgcactgcggaaggccacagggacctctgccctagaaagcctgggtattgtccaaggtttctccccactgagacagcctgagatatggcctcttgggaagggaaagacttgaccctcccccagcccgacacccataaagggtttgggccctggaggattagtaaaacaggaaggcctctttgcagttgagataagaggaagccatctgtctcctgctcgtccttgggaatggaatgtctcagtgtaaaacccaatcgtaaattttgtttactgagataggagaaaaccgccttatggccggaggtgagacatgctgggggcaatactgatctttactgcactgagatgtttgtgtaaagtcaaacataaatctggcctatgtgcacaacaaggcacacacagcacctttccttaaacttatttatgacacagagtcctttgctcacatgttttcctgctgaccctctccccaccatcaccctatagtcctgccatatccccctcaccgagatggtagagatagtgatcaataaatactgagggaactcagagaccagtgctggtgtgggtcctctgtatgctgagcgccggtcccctgggcccactgttctttctctatactttgtctctgtgtcttctttcttttctcagtctctcatcccacctgatgagaaatatccacaggggtggaagggctggcccccttcaagagagcaggtctgttttttcctcatcatttcacctccaacattgggcactagatcaggcacctcgcagatgctgagacagtatttggttgaattaaggagtgttgctccaacagctttcaagctacttagctgccaagtggcaggctgtagattcaaatgttttctggcatctaaaactttttttttttttttttgcttggagggtttgttttattttatgatctcatccttagattaccctgtgatcagcctccactcctagggcgatagagactctactggctgtttatttttactctgaaatagtttgactaggtcacatagtcatgcgattcaaaacttaaagctgtacaaaaaagcacatttgtgaatatcttatcctgttctcaatcctagttttcccctgaccttctagcttttacaggtaaacatgtttactgtgaatccgtccagtgtttctttttataatacaagtatatattatttatttgtccttttttcaaaaggtggcatacagcatacactcttttgcatcttttctatgttttgtttgtgacggagtcttgctctgttgccaggctggagtgcagtggtgcgatctcagctcactgcaacctccgcctcccaggttcaagtgattctcctgcctcagactcctgagtagctgggactacaggcacgtgccaccacagccaactattttgtatttttcatagagatggggtttcaccatgttggccaggatggtctctatctcctgacctcgtgatacaccgcctcggcctcccaaagtgctgggactacaggtgtgaggcaccgcgcccagctgcatcttttctatgtttaattatcactgagcagcagcacagcaccttgagggtaagtgaagaaggaaagactgtagcctgtcagccaaatatggttatttgttcaatagtcttattattgaagtgctgtgttccagtttttgttctgagcactggggctaaaaataaattatagacttctgcctttgtggaactcacagtccattctgaacagcagttaagtgagcagatgatgatgatcaggaaaaatgatcttcaattattcccggaagagagatgcttcctctatttccctattgaatgccttctatagttcccttccttagccccacttaagagttgcaattttatatttaatgattgcattattataaataagacaaaactgagaggcatcccagaatgctgtctgaagaagtgacatttcaaatgattcatgaaaggacaagtatagtaactaatattccctcatgttttcctgtgtgccaaacacttcacaagaagggaaagtacttgcaaattcctggtagcgtataagaccacaagatacctcagaaggggcggaataagaatcaaatgtacagcatagagtaatggaacctgagaatggagaatctggtgtttgcttgtgtacagctgaagggggccagcccctccacacctgtgggtgtttctcgtcaggtaggatgagagactgagaaaagaaataagacacagagacaaagtatagagaaagaacagtgggcccagaggaccagcactcagcgtatggaggacccacgccagcactggtctctgagtttcttcagtatttattgatcactatctttacaatctcggtgagggggatgtggcaggactatagggtaatggtggggagagggtcagcaggaaaacacgtgagcaaaggactctgtgtcataaataagtttaaggaaaggtgctgtgtgtgccttgatgtgcacgtaggccagatttatgtttgactttacacaagcatctcagtgcagtaaagagcagtattgcccccagcatatctcacctccagccataaggcagttttctcctatctcagtaaatagaatgtatgatcaagttttacactgagatattccattcccagggatgagcaggagacagatgccttcctcttatctcaactgcaaagagatcttcctctttcacgaatcctcctcagcccagaccctttatgggtgtcaggctgggggatggccaggtctttcccttcccatgaggccatatctcaggctgtctca

SEQ ID NO: 8711 - DNA, 23939 bp, Homo sapiens
cctcttttcttgccccattcctgctgccttttttttttttcttttttttgagacagagtctcgctctgtcacccaggctggagtgcagtggtgtaatctcagctcacctactgcgttcaatcaattctcgtgcctcggcctcctgagtagctgggactacaggcacccaccaccatgcccggctaatttttgcactttttgtagagatggtgtggcgggaggggtctcaccatgttggccaggctggtcttgaactcctgacctcaaatgatccacctgccttggcctctcaaagtgctgagattacaggcatgagccaccacacccggcccctggtgccttttcacggggctggaatagctgaggtagcccattctaccctctttctgccttctgcctgggacccagctggcgttctttggtttgctttctctaagctctaggcctgtgctatccaacacagtaaccacgtgtggctgtttaaatttaagtcaactaaaatcacataaagttaattcattcctcatgtgctggaactgaactggagtctgctcacctggcacagtaagaccagatatccattctgagatttttgcagcaatagaaaggaaagtgtttatttgcagggcacccagcaaagaggaccaggcagctaaggcttaaactctgacctccccgatggtttgcaggtaagggtttttaaaggcagtggtaaatttcaggagagcagaagttataggcaaaatcgttgcatggaggttacacactggtcttggcctgaaacagtgggatatcacgcagcttggggcttacaggtcataggtagagtcaacgttttctgatttgcaattggttaaagtaaagaaggtttgtttaaaaatttgggatcagcagaaaagaaggttagcttggactggtgggtgtgactcccactaagcccttcaggaagaaatttacaacaaagagttcagtcttctcccgatacttttggggaggggtccaggtttctaaaaaacaactcagaaacatatgctaagatgttgtatttagtttctgtagaggaaccaaacctctgactctgacttccttggctattgttttaggctactattaccttcttggttatcaagttgcttatttacttcccggggctaggtaggggcttggaatttccttggaaggaactcaaggttttcctttatttccatgcttgtggggagcccagcaggcccctaagagagatccctgctccatctaactcagttgcattaaccacacttcaagggctcactcggtcaccgtacgtggctcgtggccaccgtgctgaccacacagagagcgcatttccatccttcgcacagcaccgttctagagaatgcaactggcttcacaagtcacagcctcagctgtgcagggatgaccctttccctgggcaaggggaggggagatggggaagggctgatgaggttccagctggggcctgttatctgggaccctgcttctccagagaggagaggcctggttgggctggtggtcccggttacttgggctggtgggtgtgactccctctaagcccttcaggaagaaatttacaacaaagagttcagtcttcagcggatccttctggggaggggcccaggtttctgaaaaacgacttggaaatatatgctaagatgttgtctttagtttccatagaggaaccaaacatctgactaacttccttggctattgttttaggctactattacctgagcctggctcagcctgggtggacggtgcctcctcctgaccccactggctggggtaacaggaatgaccctcccttgctgcacccactggctattagctgccatcaccaccccaacccagggtccccactggaggggttctcttctaccccgggtgaccttttccgcaggcggtgttggagtgagcacctctctgtagctgtctctcacactcttgtctgttactgattttttttttaataaaaaggtaagaaaacttgataccttctatttttaaaaacaatgaatttgtgatgtatgaattatatcacacttaagttttttttatttattaaaggagatgaaactgcccaaagaaagatagaaagtggactgtcccaggtgccactgagagcgccactggggtctggagacgtgtgccccaatccctttccatctccctgcaacccttttatttttttaaaggataagctttcactctgttgcccaggctggagtgcagtggccctatcaaagctcattgcagcctcaaactcctgggcccaagcgatcctgcctctgcctcccaagtaactgggactacaggtgtacgccatcatgcccagctaatttttaaattttttgaagagacagggtctcaccatgttgccaggctgatctcaaactcctggcctccagcaatcttctcacatcagcctcccaaagcactgggattataggtgtgagcctcggcacctggcttccatctccccttttcaggccacccacttcacatctgtgtggtctaaatgccccctactcacctcctcccagtgatgcctgccctatgtcgaggctcctgtacccccgggaagggcccctttagacctacccaactgcttctggcaagatccatcctgggagggagggtgatcaggaatgtgccagggatggactgaaaggggtggctgtttcagatttcctagtaaccggctgacaggagaggttggggcgcaagcagctctatctacccacctgcggttgtttgtttaagttgtggttgttgccatggtcccctgagagcttggtaaatgaggagccaaacacacatgggaccttacctgtagacagtgtgctctggggtttagggggcaggctgggggtctctccttccccaaggcctttgtttcaaggcaggcaaaattaacccttctggccccaagacaccctgcagcctgaatccagcttgaatccaggcagatccaggcttctacacaatgacgatttaaagcatttattgagcacttactatattctggacacaatattaagccctacaggggaaagcagggtgggctgtgcaatccagagtcagataggtttgggttcaagttctggctcctcatttactggctgtgtgacctcagaaaagtttcttgatctctctgaacttctatttgtttagctgtaaaatgggaatacccatacctgcttctgaatgatttgataatgatataaagctcccagcacagagggtatgctcaccaatgggagactgtgagctctatgcaagctgggtcctaatctgtcttgtttgctgtaatctaccccctccacatgcttctcactttcccacctccatgcctttgcccatgccatcccctccacttgggatgccctttattctgctctccataaatcaaaatccttcctttcttcaaggcctggctcagatgccaactgcatcacatataggtgactttcatgcttaggctctctccctaactaaggtggaagctcctagagccaagactatgggatagcataacagcacaatggcagagtggttaattgcatgggtttacccctggataagttacttctccatacctcagtttgcttatctgcataatgggcgtaatagtacctacccaacaccacaggtatgttctgaggtttaaatgaggtaatgcactgcttttttcttttttgagatggagtctcactctgtcccccaagctggagtgcagtggcatgatctcggctcactgcaacctccgcctcccaggttcgggccattctcctgcctcagcctcctgagtaactgggattacaggcatccgccatcacgcccggctaatttttgtatttttagcagacacggttttgccatgttggctaggctggtctggaactcctgacctcaggtgatccacctgcctcggcctcccaaagtgctgggtttacacgtgtgagccacctcaccaggccaaaatgaggtaatgcatgtaatgagaccccatctctacaaaaaatataagaaattagcagggcgtggtggaatgtgcctgcagtccaggctactccggggggttgaggtggggaggattgattgagcctggggaggtcgaggctgtagtgagccgagatcatgccactgcactccagcctgggcaacagagtgagaccctgtctcaaaaataaaataaaataaagtagaataaaataaaaatgggccacctgcaccatccaatatggtaaccactagccagattgaacaatttaaagtaaaatgtatcaaaatccaattcaattaaaacttcagttcctcagtcacgctaaccatctttcacatgtaactagtggctaccagatatgtctaacaggacaccccagacagaagatgtctaccatcacaggaagttctgtggagtggcactgtagctgatgaggatttgtgaacatagcaaggtacttgacaaatctgtggtctgggtcaggaaaagagctcagtgtgaaggctcacaactcctgaggagacccccaaccctccctcctggctctccttcacagtctccgatgcccctagaagtaactagcacacctcacattatagggattagggtgagaaaggagactggtgagaaatgggcaggattagtggctcgggaaagggcagtggaggaacccaatctctgtacattactggcctggcaggaagtgggtgtagacagcagctggggctttgcagaaattgaggctggaatgtgaaatggggcagggctggggtgtggagagttacctaactgttcctgagtacatgccacgggctccccaggcagagggaaatggccagcattagccctgccttctccttctggatccaactctgtgaggagcccagagcaaggaagatgtccctgagaagatgtctgatactgaccaacatctactagcctaaagagaccctgggttagcccagaatagaggcccactgtagctcaggggtgggtacccaggatgccccaggagtaggggacctagaaaagccctaggcagaatggtgtgggctagcccagctgctggggccgaggctagcccggggttggtttcagcccatgcagaccccctcaaggctgagatgtggccatgtggccatgtggccatgctgcagcctcaagctgatggtttcttcagagagagtcatggataacagggtctctcccttcctggagctgaagcttacagctccaggggggaccaggagagctgaaggagagtatccctcagatgcacacaacccttgacagtccctatgtctcattagatcttccctctaaccacataaggaggggaaggcaaacattaacggccccattttataaatgaagcaagtgacgttcaaaagatgccatctgtcctcttcttgactgtggacacaaaagaaggacctgggcctcccacccccaacaaagtgaatgaactgtttactacactgaccaagcctcagaatcctaccctttcagagctgggtagaggggggtgatctttgcagaatcctaagtgtgggaagactggggctcagggagaaagggtacccacaaggagcggtcctcattctcctgaaactcccccttctccagggcagtggtcactggaggcctgggagggtcagcgggttctacaggcactcactctgggctccaaggtcacgggaggccagcctcccttcctcccagctgcctcctcctggcaggggacctctggcacacgctccatgcccgcctgcccctccagatctgtccccaagccaagcaggggacctcacttaatcccarttatgtaatctgcaatttaaacagttggcccatgaggaggcgcttggagccacgcccaggagtgggggcaaaaggacccagctgggtcagggctgacaaactaggcttggcctcttgcctatagtggccaccactcctcaagccccagccagcaccatgagcggccgagttggagacctgagccccaaacaggcagagaccctggccaaggtgagagcccctccccctggagttccggaagaccaggggaaaggggctggggggtggaaagaagtggctggaatcctgccccactcagttgattcagcatgtccttgacattgtctctttggtgttacctcccaaagggtcaagccccacggtgcccagtaacatcaaccctgtcccgggcgggggttgagggactagcaccacttccaggcaataacgtgggtggtgcccacccaagtcaagcctgacttcttctcatccaggagccagaaccagagaggtttacctggcagccaggtacccccgttcctccctcccaggcaccataggtaggagctgaaagatgctgctggtctgccctttaaccccttcctctttgggatcctgaaagatgaccagtctgtaaaagcccaagagacagagcagaaagtgttgtctttcaaagagctaaaggaagaagaggacatataattattaaccatgttttaatagaagatgggatgaaaaaaagcagatgttttgagggctaacacatggagggaactaagaatgcatccaaactccaatccacttattcatccacccaattatttatcctttcttcttctttttcttcttttttttgagatggagtctctgtcatccaggctggagtgctgtggagcgatctcagctcactgcagcctctgtctcccaggttcaagcaattctcctgcctcagcctcctgagtagctgggattacaggcatgtrmcaccacacctggctaatttttgtatttttagtagagatgagttttcaccatgttggccaggctggtctcaaactcctgacctcaggtgatccaccaacctcagcctcctaaagtgctgggatgacaggcgtgagccaccayacctggctgtttatcctttctttcatccacccatccctcttcctacccacgcagccacctatccatctttctttctctcaatcacccacccatctctcctctgtccattcactgatttatccacccacccactctccatccatccatctatccattcatccattgatttcttctccctttttccatctacctacccactcacccatctattcttctttctaaccatttattcatccatctatcctccttccattcatccacctatccagtgatccatctgcccttctattcaaccattaacccatcctttcatcaatgtgggccattttgcatgtgggaggaaaggagaggttgtgaaaacagtctttgagtctggaggccaaggctsaatgtgagagagccactttaaccagcatctctcttgccagttccgagaaaacgtccaggatgtgcttcctgccctgcccaaccctgatgattatttccttctacgctggctccgaggtgagggcagaggtgggagaggytgggatcagggggcatcaagaggggcctggtctcaactgctccagagtgtctcatggctctcagggtccatccacacaatcttgcttcacrtgttcaggtccagaggagggaagggggtaggggagcaaggtctcacccaggcccccagtgtcctccatagctcccactggccaggagtaagacaaggcatctttcctgtctcacaccttccttctgttttcccacagctcggaattttgacttgcagaagtcggaggctttgctccgcaaggtgagacctatccactctggaaatttatggaggggatttgtcaggggcaatccatgcctcaagcccctccttccatccctgttctcagggcactgggagcccagtgggatcttaccactcatttccctttcagtacatggagttccggaagaccatggatattgaccatatccttgattggcagcccccagaggtgagccaacaccgccaaacacctcagtctttcacggacgtaccactcaaggtcactggggaccatgaatgaggggcagcaagcctgagaggcctgtggaacccgcaggcctgcagtctcctttcctacagtcataatgaatgtttcctgggggcttgcaargtccaggcctaggttaagatgttagcagcakgagcttctttaatcatcacaatgatggatgctattgtccccattttgtggatgaggacactgaagcccagcaaaaattaggtaacttgcccacagtcccatagcccaaggtagggctgggatttatgctcaggcctgtttgggcccccaaacccaggctcgtaaccaccacggttagcctgtgcttctgcacccctgccccctaaggcattgcctaaagcatcctgtctgggtgggaaagaagtttagcccatcaaggcactgatgaggacagtgccaccactggcatcttagtagagtaatggtcacgtcttcacttgtagggcatgtacccrgakctgggcactctgctttgccaactttatctcagggactttccccaacagtcccaagagtgaggggttatccaaaccattttacaaaaaaagtaggtagaatggagctcagagaggtggtgtcacttgctcaaggacacacagtacagaagcagcagtatctgctttttttttttttttttggatggggtctcactctgttgccaaggctggtgtgcagtgtcatgatcatggctcactgcagccttgaactcctgggctcaagtgattctcccacctcagcctcccaagtctacagatgtgtattaccacagctggctaatttcttttatttttgtagggacagggtctctctctgttgcccaagctggtctcaaactcctggcctcaggagatcccatctgcctcaacctcctgagtagctgggattacaggcatgagcctccatgcccagccagtgtctgtttttgaaccagctctgttaaccttcagaatctgtgttctccatcactaaacccgactcttctccacagaaagggacacgggagacatcaggggcagacctaagaagtccaagggccwgctgagacctggctttgccatttaccctctgtgagcaaggccctcccctgcaggacctcagctttctcacctgagacaayagcactgtcttccagggagggacavtgctttttataccatggtgtgtgtaggcttgggccacccaggtcagcctggtctggggtctcaagggaggtgtgtaatgccaagttctgtgcatcttttyatgcccaggtgatccagaagtacatgcctgggggcctgtgtggctatgaccgtgatggctgccccgtgtggtatgacatcaytgggccacttgatcccaaggggttgctcttctcagtcaccaagcaggacctgctcaagaccaagatgagggactgtgagcgcatcctgcatgagtgtgacctgcagacagagagggtgaggtccaggccaggtggggtggatggctgggggcaggtgaggctgccggggggattggtctcagaaacacacctgtgttctctacaaccacagtcagagggctctggggtcaaacaccagctctgttgcttaccagctgtgtggccttgaaaagtcacagtcacagaaagacagtttcttgaargatacttttgctgggaatagaacccyctttttttttttkcttgagacagwgtctcgctctgtcacctargctggagtgcagtggtgtgatcttggctcactgaaacctccgcctcccaggttcaagggattttcctgcctcggcctcctgagtagctgggattacaggcgcccgccaccacgcagggctaatttttgtgtttttaatacagacggggtttcaccatgttggccgggatggtctcgatctcctgaccttgtgatccacccgcctcagcctcccaaagtgctgggattacaggcgtgagccaccgtaccaggccgggaatagaattcttggttgatgggtttttttgctttgttttgttttgcttcagtgttttgaatatgtcatttcacctgtctgagcctcagctccttcacctataaaacagggatatgaataaataatggttgcaaaagygaaatgaaataatgcaagtatgcaatttagcacacagggcctaatatatatttctcaacaatggtagctattgctattccctctgagcctttctttgcccttgctattccttctgtctgaacaaccctagttcccaccacacacacctacctcccacaactttccctgactttctcctatctatcctttaggtctgaaacttagatgttaccttctctgagtcccccgcctgggttaaataacctcttctgtatccctgaagctcttgtgctgacctattgcagcacttatcataggatccaaatgacctggttgcttgtcatctccccagccagacagtgaactttttaaggacaaaaactgtgggttattaggcactattcattacactttagtgtctggcacacacaaaaaagtgcttgataaatatcagtttatatttatcagtttatatttatattatggaaaaatggaggatgaataaattaatgacaatatgwatgaatggatggatggttcaattaattgatgagtaagttgatatatacgggggtgggtgggtggatggttggatagatggatggatggatggatggatggatggatggatgtggatggatggatggatgagtggggaaatgcattcactggttagtctacttgttcctctgaggacagagtcggggtctagaagaagccccaaggggtcatgtacttggattaccatctcccaagcctacaccctgaactccagaactacttcttgctctcatccttgcagctagggaagaagattgagaccatcgtgatgatatttgactgtgagggcctgggactgaaacacttctggaaacctctggtagaagtgtaccaggaggtaaggagaagtcctagggccaccccccgcttgctttgatgaccagcttggcctgccatgacccagctgcttactgagagccaagatttagtttaaaaatgtcctgggctccctcattgtgactcaaactccagaaggccttaatacctttcctagaagatcccacagaatgggtttcagggacaacactgtactgagaccacacrttccagcttccaccaaaccctctccatgcttgtttcctgacctacaaaatggggatagcaatgtagggatacttcagcaagttgttatgtaaagtgtatatacactgcttggcaaatagtgaacatttaatmaacagtagtcattattattatactaccattattataatatttactaaaaacaattattatgtaattattattagagtatggttataatagtatgaggtgagaaggttccctccagaggccaggggaggtgatggcatgaagggaaaccctccagagccatctgaaacctcccaacaggagattgcacaggagatggaggtaggagaagatgtgatgtgctctctgaagggwtctctcttggttccacagttctttggcctccttgaagagaattacccagagaccctgaagttcatgctcatcgtgaaaggtatgtgacaaatgacttcacttacttgtgcctctgtttcctcatctgtacgctgagggtgataacactgtctttgtcccaggattgttgtgaggcaggttggtttcttggctgtatgcaaatcacttagaatgcctggcatagagtaagttctcaataaatggtaacttctagkgttggccttactgcaagagaaggcagctccagtcccagctctcccagggatcctcccttatttctcctgtccatgatgatctctccctccccagactgcttctggcactggcaactggtgcagccttccctgtttgctgccttttagggatctccagctgttttatttgtgctcatcctgctttactggctgagttttctgctccttgaagccargggctgtgattctccacttttgttgtagccctcacaggcctgggtccatggtggatgctccataggtatttgggtrattgttgtgggtagatgaaaggatggatggatgtttggtgattggctagttggttgatcagttggttgcttgattggttgttcagctgactggccagttggttgcttggctagttgactaactggtggttcrttggagaattggctggctgcttggttggctagttcttagcttggttgactgattgagtggytggttggcattttggttggtargttgttttgatggctagttagttggttgcctggttagcaggttggttagttggttgcctggtttgttgtttggctgaatcttagatgattatttggatggtggctggctggttatttggatggttggctggctggttatttgactgactggctggctagttatttggatggttggctggctggttatttgactgactggctggctggttatttggatggttggatgactggttatttggatggttggctggctggttatttggatggttggctggctagagaacacagttagttgagtggttatctggctgttccattggctgattgctttgctgtttggctgatttgttagatggttgactatttggtaggttggctggttagaagttaaattgtttgactatttgttgtcagttggttggtttgttgcatagttggttggctgtttggtaggttggctggtttattggttgactgaataggtggctgattagaagtttgaatgactggctggtttgttggctgaatggttggttgatggttgcattgcatgattgatgcatgattggttagttggctgtttgttggctggttgactggttggttggatggtttgttgggtgcaggacagacactggaattgaccagggttagtcatgactcctctgtatcattggctataaccattatggagggggttgcccaatgtaattcttttcttcccattatccttacttctatctctccagctaccaaactgttccctgtgggctacaacctcatgaagccattcctgagtgaggacactcrcaggaaaattattgtrttgggaagtaagtagtgccagctcaatttcctgacctctatacatgacctttggagtgaggttgtcccattaccccatctagaactccacacattaggttgggtgcagtggctcacgaatgtaatcccagcactttgggaggctgaggcaggaggattgcttgatatcaggaggttgagaccagccacagcaacatagcaagaccccatctctacaaaaaatttaaaaattagctggttgtggtggtgcacacctgtaattccagatacttaggaggctgaggtgggaggatcacttgagcccaggagtatgaagctgcagtgagtcgtgttcacaccactgcactccagcctgggcaacagagtgagaacctatctcaaaaacaacagaactctacacatcacctagtcagaggctccttcttcccaacagtgaagtgggttttaccctaaagagtgttacctttgctcttttccctgccatacccctttggtggacaaggcctccacacctaccacctcactggtttcagtttggttgcagtcaatttctggtatataggcctcggtttcttttcaacactcataagcttagtgcttccaaaggcaaccttggcagaagaggatgaggcagacgagcagaaagagtagtcacaattcagagaaaggaracccaacaagaaaggactggataaataaataatggtgcatgcatttgatgaattctggagccgccatgagaaataaggctatatgtgaatatttaatgccatggaaatgtctttaagtttttaaaagtagattataaacttatcttcataagcataaactaaaataagattaaactaaaagtataatcttattttatgaaaacatatgtacaataaatacatatttctacaaggaaaaacaacaaaatattttttgttgatagtgagagatcgtgtggtttttaattttattacctgtattgtctatgatttctaaactgtataataatatgtattaattttacaaataggagaatagttgtgtttacaagtgacaggctgagagaaagagagagaagggaaatagttcttaaacccaaaccaatgaccctggcttggaggaaaacttctcccaagcaggatagtcagatcacagaattaggagaactgaggatccaggggtgagggggagcttataaatccttactttctctttcttcctggtacctgagcctctgcctctacccaattccactgggatggggaacttgatagattatgagggcctrgtttgaagggtccaggctcatgccttctacgccttccaaagcctagagcagtgtgggttaccagcacagtccaggccttaagtccacagcctctgccccatgtgactctgctcatttggctctggtatgtggcacattgtggtcttccccttaataccactgtagagaaggaacctcccatggccaaagtgagggggttgggggaccgggtagcctggattagccataaggctggggcatggtaacagccaggacccagaactcttagagctttacatagggcatgaagaacattatggtcatggtgattaggcagagggaagtggggagggtccctccaaaagcccagggctgtccatcccccactaggaggtctgacttgggcatgccacttacttacagagtgatcccaacaaggccgttgacgtcattgagctctaaactctccttgaggcaattagataactcttagtttcactgctcatgactggaagatcttcaagaatgtgctgttggctgggcgtggtggctcatgcctgtaatcccagcactttgggaggccgaggcgggtggatcacaaggtcaggagttcaagaccatcctggccaaggtggtgaaaccccgtctctactaaaaatataaaaattagccagtcatggtggtgggcacctgtaatcccagatactcaagaagctgaggtagagaactgcttgaaaccatgaggtggaagttgcagtgagctgagaccacaccactgcactccagcctgggtgacagagcaagactccgtctcaaaaaaaaaaaaaaagaatgtgccataggctgggcatggtgatggtggcttacacctgtaatcccaacactttgggaggcccaggtaagacaatcatttgagcccaggagtttgagactagcctgggcaacatagtgaaaccctatctctacaaaaaaaaaccaaacaaaacmaaataaaaattagccaggcatggtggtacatgcttgtagtcccagctacgcaggaggctgaggtgggaggatcacttgagcccaggaagtcgaggctgcagtgagccatgatcattccactgcactccagactggacaacagagtgagacactgtctcaaagaaaaaaaaagtgctgattcatctatcaaggcgggaaacacatttccacagcaacacaatgctgagaaagacacttactgtagccccaggcctaggacactggggaattggtcctggcagcctacctcctatagggcttctcccccagttcaggtcatcctggtgggtgtgggaggctaattggtgccccccatgcttgctaaccacccttgaatcccactgctcccagataactggaaggaaggtttgctgaaactcatcagtcctgaggaactgcctgcccagtttgggggcaccctgactgacccagatgggaaccccaaatgtttaaccaaggtacaaagagcccttccctgggacaagagaggttcaagaattaagctggattccctttccactcagtcattcatccacaattacctatagagagatgccaagaactgggtgttaagctagtcaatacaaccctcgcccttacagagctctcagcagctgtaaaggcaaacaagaaataggcgaattttaacccagagggatgagctgggaggggaagctcccagcagacgcaytggcccagtttggagggtcayagaaggcttgaggaggtgggagagtggggctaggatgaagaggatacttccaggaggtggtgaaagtgtctcaggcagaagaaacatgaacaatggccaggagacggaagcaagcccatctcatcccatgtccgcagattaactatggcggggagatccccaagtccatgtacgtgcgggaccaggtgaagactcagtacgagcactcggtgcagatcaaccgcggctcatcacaccaagtggaatacgagatcctatttccaggctgcgttctcaggtaggggcaggccctaacccctcagagacccatcaggctgagcagcaacctgtctcctccccctccccctgacaggtggcagttctcatctgayggtgcggacatcggcttyggagttttcctgaagaccaagatgggggagcgacagcgggcaggggagatgacagakgttctacccagccagcgctataacgcccacatggtgcccgaggatgggaacctcacctgctcagaggccggcgtctgtaagtctgccccagctgggacctggctctgaaaggctagagccacctgtcccatgctttagagaaggaaacagaggggcagtgacacacctcccccattcagggacacacagcctaggttagcaccattcattcatacagtcactcactcagtccatattcatgagcacctactgtgcaccaggagccagagacatacaggccctgaaggaattggggrcacctggaccacagaacacagacaacaagtgatagggcaggtgtagttttccacatgaggaaaccgaggctctgaaaaataaatcaacttgtgcagagccacaaagctgagtgtggttccagggtcccacccgagcctcagggtagctacatagtcctgggcaaaagtctgaccaatctgggaaggacccttggtttgctcacctgtgagccaggagttacaatgcctgttttttctctttttttttttttttttttttttgagacagagtttcactcttgttgtccaggctggagtgcaatggtgcaatctctgctcaccgcaacctccccctcccgggttcaagcgattctgctgcctcagccttctgagtcgcttggattacaggcatgtgccaccacacttaattttgtaattttagtagagatggggtttctccatgttggtcaggctgctctcgaactcctgacctcaagtgatccacccaccttggcctcccaaartgctgggattataggtgtgagccactgtgcccggccaacacctgctttttggggtggttgtgaggaggcaaacagtgtccagcaggcctgccccagaaccccacttcatccaagggggctgggaggtctctgatgaacccaaccatgtgccttcacagcccmgtcatgtgcgtctccaggtgtgagacaatgggatgtaatgaccattgttctcgatgccagtaaagccatgcctgggcacatgccaagaggaggttggtgtctgtttacaggacctgcttgggttggcagttcccatggggaagggaagaggcgtggtgggagcttggcccagcttggcaaacaaagccagtgggaacacaagcctgtcctcctccatggccaggggtggaaaaaagagtgtgtaaagccaagcccaatgcccctctttccatctgtcccccagatgtcctaygcttcgacaacacctatagctttgtccacgccaagaaggtcagcttcacagtggaggtcctgctccctgacgagggcatgcagaaatatgataaggagctcacccctgtctaggtggctccctcatttctcagagacctcctaaccctttgatttctctgtttatatcctacactccctccctccctgaaattgattgttagtcctcctgactctgtgacgttagtgagtacagaaagagatgccctggggaaaactcatctactgtggtcagatcaagaaaggtatgagaggcacaaccttggagggtaccaaggttgcagaagaggaaaaagcaagggtaaaggcaagaagtgggtgtcatgaaactcaataaatagcaaaatgaatcccctagcctttgtcctcacctaccctaaggcaggtgtgtatgcttgaattccttccgtatggctgtgagcaacttgggttggagacatatctaaatcctttttacttccactccctatatatagtagatgctcagtgtatatttgtggcattgaatggaggaccagaaggtagggtgcaggtgactcaacagctgtacatgattaggaggagcctatgtggggtggatttcagcaccttggacaggagcagatgtgtggtggggttggactctcttctggagacccagacaattcagtctccagatttctggcagtggctgtcttttgagggccccagccacaaaggccacatgcctctgataggagctgcctacatcaggctttgtctgacttgcacgctcagcttcccaccctaacccacttcccttgttgcacatagcttatgttttagggactttcctggaagcaaaggcagtcacatctggcataatcataataaagaaaacaactatcatttggcgagtgctctctgtgtaccagaaactgtgccaagagctttgtgagtttagcatgttttattctcatgccatccccaaggccctttatggataaggaaatggaggctcagaggggtgaagctactcactcaacatcttacagcttgggtggcagatccaggacctggggcagggggtgttcgtttgtttgtttatttgtttgtttgtttgttttttgagacagggtctcgctctgtcgcccacccaggctggagtgcagtggtacaatcatggctcactgcagtcttgacctcttgggctcaagccattctcccacctcagcctcctgagtagctgggactacaggtgggcatcaccacacttggctaatttttttgtatttttttgtagagatggggtttccccatgttgtctcaagctcctggcctcaagtgatttaccccccatcagcctcccaaagtgctgggataacaggcctcagccaccatgcctggcctgtttttgctttgtttactccaatgacattgctctcagttgccttgtaataccgcctcctgcctataatcccagcccttggggaggctgagatgggcggatcgcttgagcccaggagttttagaccagcctgggcaacatagtaagaccacatctctatcaaaaaaatttaatatagtaagaatatgacctcctaagattccacttttacaaaggcagtgagaaggcatgatttatttgttctagaccttccagtagaagtgtcctgcatgtcaccctctccagtccctgtttgtgggtagaggaggtgataggccatagagacccacaatactgaagcagcttgtccaaggaaattcacagcagagtggggcagggcttgtgttcctcagctcagcatcctgtccgctgctcacatggcatctgtgaagcacaaccccctgacgctcaccatgaccctgggtgactagggcaaaggccaggactccagagtttccttcccaactttctgctgtgattcggggacgtgaagaggctggcttgagccccagtccctgacacaactcttgccaggggagccggatcacacccgggaatggggatgaatgggaaccaaaggctggtgccatgagaggctccttggaaacaaacaaacggagggctgagctcatccgtgggcaggctatgaggtctgactcaggctagtcaagcaaatattcagcagcagcaagcactttcccacatgcacttatgggtgcaaaatctgatatctgctttatagatgggaaactgagctcccaaaggcactggccttgtatcttcagcctacaggtgacagaaatagtcctggagctaaggctgccccttaccccgtcacctcttcacccccaccactcttctataacaatttgtcagaatgggacaagactgccttcttcctgagctggcagggaaggaggagggaggaggaaggagaaaggaaaaaggaaggaagagaagagaaaatgagggttgtcagatttagaaaggaaaaaaaaaaaaaagcatggccaggtgcagtggctcatgcctataatcccaacactttaggaggccaaggcaggcggatcacttgacgtcaggagttcgagaccagcttggccaatgtggtgaaaccccgtctctactaaaaatacaaaatttagcctggggaggtagcacatacctgtaatctcagctcctcagaaggctgaggcatgagaatctcttgaatccaggaggtggagattgcagtgggctgagatcacaccactgcactccagcctgagcaacagagcaagactccatctaaaaaaaaaaaaaaaaaaaaaaaagacatacttaaaatgtatccattgtttatctaaaattaaaattgacctatgcatcttatattttatctgacaatcctaccaatgagggaagatggagggaagagagaggaaagggaggaggatggaaagagggggatgggttcaccttcttggaagacggtggcagcacccacaatttgggccaatgatgtcatggaatccttgggagaggatggcttagtgtgggtgatgcagggtcgggggacagggtggtctcacccttgaccaccaaaggaaaggcctcgatgttgaagcagggtctgaggtagagagtgtggaccctttgtgcctttgggactaagatgagcagtgctgttgccagagctcctctgtggcagctgagtggaggggacttgcaccaggaggtggagcagtgcaaagaacctaaggccagggccagagctgagatctgcaaagtgcccatcagcatccgctgatgcccacccctggcaagccagctcccactgtgtgcacacagccagtaagaggcaggcttcccaagctccagcttctagcctccagtcttactcagggtctagatgctcagctccagtcctgaatctccaggaggcagcattggggaaggaaagagacccactttgtagctttggccaatggtcactaatagagtttggatatttgtcccctccaaatctcaggaggaaatgtggcccccgatgttggaggtggggcctagtgggaggtgtttgggtcatggcggtagatccttcatgaatggcttggtgcctgcccgccataatgagtgagttcttattctacaattgcttaaaagaggctggcacccctcccctcttcttgctcccttcctctcaccatgtgacacgctggctccccttcctcttctgctatgagtaaacgcttcctgaagccctcaccagaagctgagcagatgccggcaccatgctttctgtacatcctgcagaacaatgagccaagtaaacctcttttctttgtaaattacccagcttccaatattccttttttcgtgtttggtgtttgtttttttttttttttttttggagacagggtctcactctgtcgcccaggcaggaatgcagtggtgcaatctaggctcactgcaacctccacctcctgggttaaagcaattctcccacctcaacctcccaagtagcagggaacacatgtgcctgccaccatgcctggctaatttttgtatttttagtagagatggagtttcaccatgttggtcttgaactcgtggcttcaggtgatccacacaccttggcctcccgaagtgctgggattacaagcgtgagccaccttacctggcccaatattcctttatagtaacacaaaatggactaacacagccccctcattccagaagtgataagctagcagcatagggcaggaaaaccaaggcctgcaggccccccattgtgtgagaaggaaagttaacttagaagttcctgttccaacagcccagaaatgccaaggcagagccagggaaggaaaagtctcactgttcttgggaagctagagttggtggccacaggccatttcccatagaggagtcaaatttctgctgaggccaaaaggcgaggctcccaaccgtgtagacctcaggccagggacaccggtgggcaacactatgctggtgctaatgaggccccagccctgcctcttactccttccccaagaacccaccaccacactggccccttcagagaccacaaatgcatgtcacaaagttaagacatcaggtttttcccctaacaactagtaccaaaaagcacaaggttaaggcaacacaggccaggtgcagtggctcgtgcctgtaattccagcactttgggaggctgaggcagctggaccacttgaggtcagttcaagaccagcctggcaacatggtgaaaccctatctctacaaaaatataaaaattagctgggcgtggtggtgcatgcctgtaatcccagctacctaggagactgaggcaggacaatcacttgaacctgggaagtggaggttgcagtgagccgaggtcacatcactgcactccagcctgggcgacagagactccgtctcaaatatatataatatattatatataatatattaaatattatatattatattatttaatatttatattaatttatattatatattaaatattaaatataatatattaaatattaaatataatatattaaatattaaatataatatatattaaatattaaatataatatatattaaatattaaatattaaatatattatatattaaatatttaatatattatatattatatataatatattgtatatctattatataatataatatattatatataatatattatacatctattatataatatataatatataataatatattatatatctattatatgatatataataatatattatatatctattatataatatataataatatattatatatctattatataatatataataatatattatgtattatataataatataatatattatatattattatatattatattataatatataaaatatataatatacaataatatataatatataataatatattatatattatatattatatataataatattattatatattatatattatagattatatataataatatatattatggattatagattatataataatattatagattatatatagtaatattatagattatatctaataatattatagattatatctaataatattatagattatatataataatattattatagattatatataatattattatagattatatataatattattatagattatatataataatattattatagattatatataataatattattatagattatatagagagagaaacaagggttattttttcgttgtcttctgaaggggccactgcctccaggtcttcctccaaaatagactgagattccatatcaatttcctcctcagaagagagtctctctgttgcgcaagtcaccagccccatcttgtgggcctcccagctggcagggcaccaaaacagagcctcttaagctgcagagagggcaggatggctggaagacctcgagtgccttcctcagggtcacaggagcagcaacagagtgacaccagtgaaggccagtgcaaccagcaaaaagtccttcagcatcttgcaggaggctgggaaggagaggtccaagagcaccccaggactgcccagaggtgcggggcaggttgtacaggacagctagggtgagtccagaggtaggaaaacaaaggccaggagtgcctggggaag

SEQ ID NO: 8712 - DNA, 159138 bp, Homo sapiens
  misc_feature (1)...(159138): n = A,T,C or G, or insertion/deletion polymorphism (see Tables 1-2)
attgatgaggagagcaagtagaaatgaaaagagaaaaccagtattaggagatctataaagaaacaatagtcagaaaaagagtggttaaagaggcagaagaatcagaagagaaccagattcatgaaataaaagagaggaatcagtttcaggaaggaaagtgtggtcagtagtgtcaaataccagagactgaatagcctaaggatttaaaagaggtcaacagcaccaccaattaagcggtttttctgagcttaagatatttttctttatttttctatgttaaaaatattttataaagaaaaagaaaaaaagagatcacatttgcccccccaacccgtccctggcctctctctctctaaggaagtcgttaatgaatttgggcagaatagattcagagctgtgagagtgaaaatttgactgcagtgggtgaggtgttaataaaagggagggggtagagatgaaatctttccagcagtttggctcttaaggggatagcttgaaggaaagagggttggaagggtggtttttaaaaagaattatcactcactaatcaactagaaatccagtggaatatgcagtacttgtctgtaatccagcaggctaacttttttttttttttttttttgagacggagtctcgctctgtcacccaggctggagtgcagtggcatgatcttggcttaccgcaacctctgcctcccagttcaagcaattctcttgcctcagcctcccaagtagctggaactacaggcatgcaccaccatgcatggctaaattttttttgaatttttagtagagatgagtttcaccatgttggtcaggctggtctcaaattcctgacctcaagtgatcacccgcctcaacctcccaaagtgctgggattacaggccagagccacagtgcccagccaaggctaacctcttgatcccaatgacaaacagaacaaacatcttactcaagtccagaagcaataataattttgaatcttgcttgcatgtcaacaggagccacattaatacagaagaggatcacattggtccaattaaattgaattgattgagagcctctgcaatacacggtctactgcacaaataatgatggttcctggtacatttttatttgaccattgattgctcgatttgtttctgtgtctaactgtgtattggaattaagctgactcaatttgaactgcaggtccttttatccctcttattttttatttatttatttattttattttaaggcatttctcactctccagaaaatctctaagatttcagctattaggcatttgtctttttttttttttttttttttttttttgagactgagtcttgctgggttgcccaggctggaatgcagtgtcacaatctcggctcatcacaacctccacctccctgattcaagtgattctcctgcctcagactcccgagtagctgtgactataggtgcaaaccaccacgcccagctaatttttgtatttttagtagagacaggttttcactatgttggccaagctggtctcaaactcctaacctcaagtgatctgcccgccttggcctcccaaagtgctgggattataggcatgagccaccgtgccccaccaggtcttcttaatcataacaaattcatcttaaaacatcattttaaaatatattattttttattcttcattgacttcctgcattactctattttttcagagtttctagcaaccagtatcattggtattttaaacaatgtgtacatgtacatttatgcagatgagttaacatatatcaaagcaacctccaaacaatgccatttaggtaatctccaatttaaaagcctcaatagaatgataagattgagcttttctgtagttccatgacctccagcagagtctgcaaggccacagctgcctgaagrttgattctgtaattagaagatgccagggtcatctcagaatagaacctcaagccacccaggctacatttacagaatcagcctctccagaaaaacagcaacaaaggagggccttcctatgtatttggaaggagtcacctagaggagggacttggggttttggtgttggtgtggggggcagggatgggatggggagggggaagcttattgaaatatactaaaagacaaaccaacctaagggctggagggaagaaaattcacacttgtaagcttctttttcaaggggcatctcttaggctctagcttttgagattcagtatatatatatttttgagtcttgctctgctggagtgcagtggtgtgatctgggctcactgcaagttctgcctctcaggttcacaccattcttctgcctcagcctcccgagcagctgggactacaggcgcctgccaccatgcccagctaattttttgtatttttagtagagacggggtttcaccctgttagccaggatggtctcgatctcctgatctcatgatccgcccgcctcggcctcccaaaatgctgggattacaggcgtgagccaccgcgcccggcccagtatttttgttttatgaagatattacatttgtaaagtatgagcttggtgtcagcaaacttatatccctgtgtacaaactggccgaatcacttagccactttgggccaaatcacttagctcttctaacagtaagaaatcaacaagaaaaataaacatttcaaacattacaatgtgttcatgtattcactgtgggggatgaccagattctcgaaaccacaggttgttcttagtgaaacaagtttgggttggggccatagacttgtgtatttagaatcaatggctgttctctctctgggactttgatttttttcttgggctcatcccctttttgtagtatcttatctttgtcttatttgtataggacttaactgttcccattcccttattagagcaatctaagtgattaccttcataccttttggaattatatgcttcaaaattccaaaaagaatgattttgggctgggcacagtggctcacacctataattccagcactttgagaggctgaggtggatcgcctgaggtcaggagtttgagaccaacctggccaacatagtgaaaccccgtctctactaaaaaatataaaaaattagccgggcatggtggcaggtgcctgtaatctcagctactcgggaggtggaggttgcaatgagcccagatcgcaccattgcactccagcctgggcaacaaaaggtgaaactccatctcaattaaaaaaaaaataatgattttggtggtcgacttcaaataggtaggagaagaaggagagaggagatggagggtcagggagatctaattactctctaaaatcatgctaggaaagataacaccttttaataacactctctgcttttataacatcattctgccaaggagctcaaaggtttcaacaaagttcactttcagaaaacccctttgaggaagacagaatatacatcttctctccattttaaagatgaagaaacaggccgggcacaatggctaatgcctgtaatcccagcactttgggaggctgaggccagaggatcgcttgagctccagagtttgagaccagcctggataacatggcaaaaccctgtctctacaaaaaaaatacgaaaattagatgggtgtggtggcatgcacctgtggtcccagctacttgggaggctaaggtgggaggatcgcttgagcccagggagtcaagtctacactgagccatgattggatcactgcactccagcctgggtagacagagcaagaccctgtctcaaaaaaaagaaatgaaagagaaagaaagaaagaggagaggagaggagatgaggggaggggaggggagsagggagggggggaggaaggaaggaaggaaggaaggaaaaaaagatgaaaaaagaaaaaaacaagatgaaacagaggcagaaagactttacgtaaattgctcatcatgtggttgtcaagtttgaccccaaaacccaatttattgaccaaggttattctttgactgaggcaagggggtccgctctcctgggccttgggctttagaaagctcatctctggcctttctgagatccatccctttctttttatttttcttgacacggagtcttgctctgtcactcaggctggagtgcagtggcatgatctcgactcactgtaacctctgcctcccgggttcaagcgattctcctgcctcagcctcctgagataacaggcgctcgccaccacatctggctaatttttgtatttttagtaaagactgggtttcatcatgttggccaggttggtttcgaactcctgacctgaggtgagctgcccaccttggcctcccaaagtgctgggattacaggcatgagccactgcgcccagctcagatccatccctttctaagggcaaacagtccatggtgcaaaggggccatgccacccagagttatgagtacctgggactccagaattccttgcctggtggcctccacatgcacttccagggcctgcttgggcctcttctatgggtctgtcctgagtgttgatagaaccactgatgtgagtacctgggcttgagccgtggcctggagatcctgttgactgtagcatggagggggcttgtgcagctgaatgtctgcatgcaggtggtgggagttctggaatatgatggagctggaggtgggaagagaagtaggcttggggcagctctctcatgccacctcattctggccaaaactcaggtcaaactgtgaagagtctaaatgtgaatctgcccttcaaggtggctacaaaggtatctttgtcaaggtaggagaccttgtggcctccacgtgcacttccagggcctgcttgggcctcttctacgggtctgtcctgagtcttctatgaatctgcccttcagggcagattcatatttagactcttcacagtttgacctgagttttggccagaataaggtgacatttagtttgttggcttgatggatgacttaaatatttagacatggtgtgtaggcctgcattcctactcttgcctttttttttgcccctccagtgttttgggtagttttgctcccctacagccaaaggcaaacagagaagttggaggtctggagtggctacataattttacacgactgcaattctctggctgcacttcacaaatgtatacaaactaaatacaagtcctgtgtttttatcacagggaggctgatcaatataatgaaattaaaagggggctggtccatattgttctgtgtttttgtttgttkgttttgyttgtttctttttttgtttttgtggcctccttcctctcaatttatgaagagaagcagtaagatgttcctctcgggtcctctgagggacctggggagctcaggctgggaatctccaaggcagtaggtcgcctatcaaaaatcaaagtccaggtttgtggggggaaaacaaaagcagcccattacccagaggactgtctgccttcccctcaccccagcctaggcctttgaaaggaaacaaaagacaagacaaaatgattggcgtcctgagggagattcagcctagagctctctctcccccaatccctccctccggctgaggaaactaacaaaggaaaaaaaaattgcggaaagcaggatttagaggaagcaaattccactggtgcccttggctgccgggaacgtggactagagagtctgcggcgcagccccgagcccagcgcttcccgcgcgtcttaggctggcgggcccgggcgggggaagggcacgcagaccgcggaccctaagacacctgctgtaccctccacccccaccccaccccacccacctccccccaactccctagatgtgtcgtgggcggctgaacgtcgcccgtttaaggggcgggccccggctccacgtgctttctgctgagtgactgaactacataaacagaggccgggaasggggcggggaggagggagagcacaggctttgaccgatagtaacctctgcgctcggtgcagccgaatctataaaaggaactagtcycggcaaaaaccccgtaattgcgagcgagagtgagtggggccgggacccgcagagccgagccgacccttctctcccgggctgcggcagggcagggcggggagctccgcgcaccaacagagccggttctcagggcgctttgctccttgttttttccccggttctgttttctccccttctccggaaggcttgtcaaggggtaggagaaagagacgcaaacacaaaagtggaaaacaggtaagaggctctccagtgacttacttgggcgttattgttttgtttcgaggccaaggaggcttcgggaagtgctcggtttcggggactttgayccggagccccacatccccaccacttgcaactcagatgggaccggaggcggtgttaaatggggagackatgtcctagtacgagctctggtgaccccaggactctgcgctgctgcgcttggggcttgcccgacggtggagaccggggagcatctctgggcgtggagacccgggcgcagtaccccgggctcagaggggtcgggggttcccgggcgtgctgagggcgctgctgccgggtggggagagctgcaggtccggcaccgagcgctgctttgttcggagggccctgagctggctagaaacccttctggttgcaggtcggccagtacctacggagacaaatgccagcactgagtcttcactcggttcttaagaagctggtctgttctgacctgggaattggctatatgctccccsggactggagcggcacagtcccggactgtgaatccgggaactcgagttggaggtgtcccaaacggtccgtggtgctattgctcactagaggccttgggtctttgtttgacctgaggggtagggaggtcctgcctacagtctccgtgcgctcagctgagctggtgtccctggcgcagagcgcggacgagttttgtttccttttctttttyttttttttctttcctttaagtctcggtctgtcgcccaggctggagtgcaatggaacgatctccgctcactgcaacctccgcctcccgggttcaagcgattctcctgcctcagcctcctgagtagctgggattacaggcgcgtcaccacatccagctaatttttgtatttttagtagagacggggtttcaacttgttggccaggctggtctcgaaccctcgacctcaggtgatccaccggcctcggcctcccmaagtgctgggattataggcgtgagccaccgcgcgcggccgagttttgtttcttttaaaaacaagacttaggagagcctgcggagacccggaggtggggtgcccaatcctccctctcccacgttccctgcagccccatcttccagaccgttgctgctggtctctcggggcagcttctgcctgggcgcagatggggaagctgggccgaggtggtgccgtggaatgaccgggagtaaccccggcgggcggcgcagaactcggagctccgccgcggggctgggctgggctctgccgtgagggtgggggtgctgggcgcgcgggctgcggtggcccccggagactggcccgcagcgcctcctggccggaggacctaggaatcggccggctctactaggtgtctttgctcgcggttccgactgtgaatccggtgaagaccggtggttgcagacggggaggaactatgaggttgaggcgaaagcccgttttgtttttttttttttgtttttttggttttttttttgttagcgtgtttgccaactcccaggccattggtaaagcaggaaggttcttggggcggcggacggtgccagggttatgtgtaggtgcctctttaggtatatcktttatcaaaaagaagcaaagaaataagattaaaaataaacaaagaaaaaagttgtctggcactggcagtaattggcctgcctttgcagcactgataccattagcttttaaaatccgacttttcattgacacttcaagaagagaatgggtagtatatacacattcatctcatagtggacaaatttcatatttaaaaaaaccttctgggtactgaaatcagcaagtcacttgccctccatggccgaatccctgcttcccacgaagagaacctcacaaaaatttcccccaagttaaagagtggaattttcttgatttttttttcttttttttttaacggccgtagtttagaacccagacttaaattatgatcttcttttcaaacaaaacttaaagtccttaagttttcatctccccttttatttcaacctattcttctcatacctaccacaaaaataatggaggctttctgttgagaaactttccgtttctgttgagagtatcattctcttgagaaactttctcctaaatcagagaaagtatggaagcatggaaagtattcctgagtagaacytctacagatattacaatatttttcaaatacaaagtttccattgtcagcctgtttcccaagtgcttccacaaaccattaaataattccacaaaccattaaaataattaatgctagggaattttaggaaaacattggtttacaatcagaaggacmggggaagtgggtcttcagccttcacgatgactacaagccatttaagggactagaattgctactgttgtcagagcaatttaggagtctgtatttgagcacccgcatagtgttccagaatgacatatctgactgtaacctggacacgtgtgatatgttgtctcccctgcagatgagcatttgaaatctcaaccctcrtatttctacgagwgcaggcctataatggaccctgggcacattttttttttttttgagatgcagtctcgctctgtttcccargctggagtgcagtggcacgatatggctcactgcaacctccacctcctgggttcaagagattctcctgcctcagcctcctgagtagctgggactataggcgcacgccaccatgcctggctagtttttgcattttyagtagagacagagtttcaccatgttggccaggatggtctcgatttcctgacctcttgatccacccgcctcrgcctcccaaagtgctgggattacaggcgtgaggcaccgcgcccgacccctggacacattttgacttagaacatattttcggtttgtgtgagacagtgcattagtgcaggattggaaaagagtgatcaggaattgattgttttcaaggattggttccttctgctcaaggaagtcccattgtaaacataaaaaaatgaatgaaactgaagaagttcagtgacttagctttttaktatcttctgtagtacttacctttttggagaggagttggttgggatatttttccatttaaattttttttttaaagggatcttctctcccrtaagccgggatacttaagctatatatgtagtggctacaaattaaggtcttcactgttttcatttttagctsctagaataagtgaacattaccttagatagactcttctaattatgaagatatctagatgtctagaaaatatcaaaatgcatgtggtttttgcatttctaaaatacttttaaaaccaaatactttttyttttttttttttttctgagatggagtcttgctcttttgcctaggctggagcgcagtagaatgatcttggctcactgcaacttccgcctctcaggttcaggtgattctcctgcctcaacctcctgagtagctgggattacaggtgcgtgccaccayacccggctagtttttgtgtttttagtagggacagggtttcaccatgttggccaggctggtctcaagctcctgacctcaagtgatctgccagcctcagcctcccaaagtgctgggattacaggcatgagccaccacacctggcctcaaatacatttttttaagtatccagatattaaataaataataccattatagtagttgttatggtcatttactctagcatcaaatgttaaaagatcattctgaacacttgttttgtttatgctgagagaaggcctactccaaaaaatgcaaccatcttcgtatctgcatgtggatacaaccatgaatggccaaagttattgcartgttgaatagacacttatatagcactgtgtggcaagtactgtttgaaatgtttttcacgtgtttattcattgtatttattttgagatagggtcttgctctgttgcacagggtrgagtgcagctgcacagacaaggctcactgcaacctcagcctcctgcgctcrcgtgatcctcatacatcagcctcttaaggagctggggccacaggcacgcaccactgctcctggctaaatttttacaattttttgtaaagacaaggtctcactatcttgcycagactggtcttgaactcctgggctcaagtgatcctcccacatcagcctcccaaagtgctgggattacaggcataagccactgtgcaggtcatcaaatgctaattgaattttcacaacaaaaccatttattgtccctagtttacaagattaagtaaatgagaagctaatttttctctggctatataccttgcaagaggcagagctaagacttgaacccagccagagttctttaactccagcactaacatttcagctgctgcaaccagggagcttttcaaggatgatcaccacattctctacattcatctgctataatccttatcagaatctacagcctgtatcatattttccttgttgctgtgagtgggtcagccaaattctctttaacttgaaaccttggttgcgtagggattgcaacatcctggaaagaatagaataaaatttactcaactcaattttttacttggttcataatgaaaactatactattgcttcagtcagatgtttgcgaatagctgtgtgatctcaaaatgttttcctatgtgatctatakaaaatggaatgatagagtattaggctgtaagggcmtaagaaacaaaggaaaaagagaagtgaactgttagtttagttgtaaaacctaactttggtgaattgtaaaaatttgttataatacaatatgattcttgcttgtcctgtccttgatgaagttgtggaccttttgaaataagctatttctctgttactgctgttactgtttagaaatcaaatttagttttttcttaagatatacgtatttttggaagataaacacagtttcaaagtctgccttgttggctgggtgcactggctcattgttgtattcccagcactttgggaggccaaagcaggaggatcacttgaggtcaggagttcaagaccagcctggcaaatatggtgaaaccccgtctctactaacaatacaaaaattagctgggcgtggtggtgggtgcttgtaatcccagctactgggattgggaggctgaagtagaagaattgcttgaacctgggaggcggaggttgcactgagtcgagatcgtgccactttactccaacctgggcgacagagtgagactccgtcttgaaaaaaaatgtctgccttgtaaaagtgaaataggatgagaaagtgcctttcttattaattggtgtaatgaattaraaataaactctttgaagacacctcttggtaaaaatagttacatttactgttgatttatggtatgttggatatgtttttaagttttccgtgtaataactcagttcattctcatgagtgaaataggtgcttttattgtctttatagatgggaaactgaggtataggcaggctaggtacattattatggagttcgtaagtagtggagctgaagtcgcatcccagacagtttggcttccgtgagtttaccaatctcatggtaaagactttgtcagactatcaaagttttgacaaatgaaatattagcaaaaggccaaaagggattctctattttcatttgagtatcttcacctgaaaatagttgcctgaataagtagcctgcatagaaaggtacattttagaaatacttgaggccagagaatgaaaagcttacataaaattgatttccggtggggccttcagttactctccattctacgaagaccacaaatagcattcaggcaaagagcatttattccaacaatggaggagcaytggatttggttcctaaaacaaaataaagtttgaaatcctgtctttcccatgttgaaaacaaagttggtacaaaaccctttagctttkgcaaacctcctttaagacccgatttaaatgcytccctcctcrtgaagctcttctggatccactcyttcccatcactaagttgaaagtmagatccccttctctttacttccattagacttggattacagcactctttgtatcatgtatttaattctgttttttaattacagttaacatttatttgtcttcctcttgagtgtatgcttctctagaggaaggtctttgattcattctcccctggccttaattcatcccacttaatatggaaaaaatttaataaatgctgacttgaataagtccaacaaggagaatgggaagctcatgtttgcttcctgtcttctaaaagactacttaagataacagggtaatcacagaaaagcattagaaatagagttatatgagaaacaactgtagttaaggctaggtttatgttagactgagaaattttagtgcatacttaagttatttaggccaggttactttttgtagaacaaacatttcagtttcgctcagtttcatttccgtttctgaggcagctgtgatttaagaaaatgctctagtctgtggcattccatattcaagtactttgagttgtatattaatttatttttgttaataagagtgasatgactcactaagtaatttagagatttaaacacttttttaaaaaacagtaacttcatatgcattggatctattcttctataaagtcttttcttggggggtgtttgtttaaaattccccggtgttttctctgccaaatccaacttccaagaagcatttggaagtcaaaacattttatctggttagtcttaaagtccagatattttgtgatagctggtatttagtttaygatatttcccaggaagaactttttagtagttgaaccatttatgaaagacttccttgaagctaccttagagagttgatttagttcttcctaaataagtaaatagaatattagtattaggacatcttggagtatagatgcaaatattggtgaaaaagaacatggatatcagagtcaaattaatgtagattggaattctggttattactaatggatatctgacattaggcaagttgctgatcactctttgcctcagtttcatcatctgtaaaataggtatttgtgtttgtgtataatgtgaaccgtataatataatgcttggcctatagtgaaatttattcatacgmgtgttttcagtgattttaaaagcttgctttaggccgggcgcgatggcttctgcctataattccagcactttgggaggccaaggtgggcggatcatgaggtcaggagttcgagaccagcctgaccagcatggtgaaaccccgtctctactaaaaatacaaaaattagctgggcgtggtggtgcaagcctgtaatcccagctactcaggaggcttaggcagaagaatcgcttgaacccrggaggcagagattgcagtgagccgagatggtgccactgcacagagcgagactccatctcaaaaaaacaaaacaaaacaaaacaaaaatcttgctttatagtttacttccacatcaaattgtctttatcccatgttacttgcattgatatcccagacatgaaaagaaaaaaagatgataacaatgacagttattaaattaggttccactcttattctagatcaccaattcatattactattcagacttggaacattaaattttagttaaactttttttcaaatatgcatataattgtcagtggttactatattttggggaagagattgttgacttctttgaagaaagatacggattttctcttcagaaraaatacacatgggctcatataatccaaattttatgtgtaattacagggtgttcatgaatgcccacaaatccattaagccatgtgaccttggacaagtcattttacttttctgttttttaggttgttggtctgtaaaatgatactacttgacttttaaagagcccttcaagctcttatgtcctctaaccccaggtctgtattcagaagaaggggtggtcctttaattagagccatctagagatctgaggaacatgctgggcattagtgtaacataccatgtggattttgagaggtaaagaaaaaataaccagggaatgcctcagagcattcctgatcagatcgatgacagaagaaaggaatgagagggaggagaggaagctgttgaaatttcctatttacctgctttgagtgaatgaagatttgaatcatagaaccagaaggggttctcatctgaaatgcaaaggaaggaggagttggtttaattcaataagtttcagttgagtamacatgatttagtgagayactgttcttgcttctgactcaycatttggaaaatctctctaaaataaaattggactctccatctcggacatcattttgggtgtaggttttgcttttttttttgagatggagtctcgttatgttgcccaggctggagtgcagtggcgcaatctcggctcactgcaacttccgcctcccagattcaagcagttctcctgcctcaacctcctgagtagctgggactacaggcgtrtgccaccatgtccggctaatttttgtatttttttaatagagacggkgttttactatggtggctaggctgktcttkaactcctgaccttgtgatctgcccaccttggcttcccagagtgctgggattacagatgtgagccacagtgcccrgcctaagttttacttcttataatggactcctgttaagccaataggtgatgaaaggaaaccataaccaactcttcaggctcattcatccttcaagaatagcatgctagtacccatcctaggaggagaattggactatacctcatgaggatagtttgaagtatctcagaagaccctcactgggggtaggtcggtaagacacaaagctttctaaagcactgtaccaaatttgttgtttgagagatcataacaaattagaagtggaaagaagaaggagtaaaaggaagaagaggtttctggccaggagcagggagggggaaggagctgctaggaagatgtttggttgtcatatccctgttcacccttgctttgcaaaattcttgtaggatgccaggttgggagtaattgtttttcacaagagtcaaaccacgcttgttttcttgaagaagcaagtctttggagggtggtggcttgaaatctgttggatctggtatttaggtgatacactttgacataaaggcaacactgatgcaagcagcagctttccttggaaaggcagggagaaagtgaaggcccagactgatgagcttacactgacctgcagacccttctccattcccaggcatgtttggtggcagagtttaccttagttggggttaggctgttgtctggtactgtgagagagaaggaagaagaagataygatattaacaacaacaatacatatttatatttgaaaattaaatgcactaatacacctatagtgctattaaacaaatttatttgttcagcaaatgtttgttaaacaccatgtactgtggaaagtactaggtgctggacagaggtcaaaagacttttaagaatctgccaccattaatgatctctttctgcttggcattcaaggctctttgaaataagactgtgacscactttgatagttttgtcctggattataagacacatgctcgaaggaactatagctggttttctcaccagactgattaacatatagtatggtttggtacctgttaaatgagtctctctctacaggttttcatcttctaytttaagaaccccttcctggcattgtttggctcctcattgttctggaatctcatgtccatctcatgtatttgccttggttcacacttgatcttctrctcatattcctcacctactgaaattttacccatcaaccagaccgtgggtgatggaacacagcatgggctagttcttcttatatatgatctcatttaattttcwctggaactctgagataggtagcatttcagcccactcaagttgactcaaatttttgtaatcatcaatatattttaaaataactttatatttgacctgtaattggaaaaccaatatgagttatcataaatgaaaggtaattttaaaaataattaggatgaagacaaattatttttctcacagtctatgtataagataaactattggttcccaaaggccccagctgacaatgagacttctcttactttgttgaaaagggaattagcaagcattaaagaggtgtcaaaaagaagactaaacaaaagcttactcctttttttttttgagacgagtcttgctctgttgcccaggctggagtgcagtggcaccacctcggctcactgcaacctcttcctcctgggttcaagcgattctcctgcctcagcctccctagtagctgggattacaggtgcatgccaccacacccggctaatttttgtatttttagcagagatggggtttcgtcatgtyggccaggctggtctccaactcctgacctcaggtgatccacccacctcggcctcccaaagtgctagaatcacaggtgtgagccgccgcacccggccgcttactccttaatgtactaagaatgttatatataggctgaagaagtgctgaaaagaaccatattttctcatgatgtggttcaatgtttaatactgtgcttgttcatctcctaaaatcctctgaatatcacttaaattcatcctgtgtaactctcccacatttggggaaatactgagcttgcctattattatattagccccatatttcagatgatgcacctgagccgaggagaagttaaataacttgttcatggttccatatttggctaatggcagagccagggattcaaactcttgtctctctgactcccaggtttgtgcttttcccacttggctgaatttctcatgctacctcctccataacacctttcctagaacttttaaggaatgcttcccctgttctctcatagcattttaatgtaagttgccaaagtgtcccagtttgcacccctaccagcaatgtgggagaaaatagcaacatatttttgatgttggggtctagtgttacggtttcttctgctctttgggatgtatattccatggcwactgaatacccaagtcccaaacagttttcttagactcagaaggtcatccacttcagcttcttcatcaaaaagacatattttctggctgggcacggtggctcacacctgtaatcacagcactttgggaggtggaggcaggagaattgcttgaacccaggaggctgaagttgcagtgagcccagatcgtgccactgccctccagcctgggtgacagagcgaaactctgtgtcaagaaacaaaaaaaaggacttgttttctgttccattacccacagtggtagaatggcgtgctaaatttattctccagctgccattaactgcaaattaaaatcttagtctcttgcctctttaatccaggcttcttcatactataccagaatttaggataactattacagtgccctttataggaragaaagaagaaattgtgtctgtagatgtctgttcctttcagcttaaaatggacactgaaatgttaaatattggactggcctcatttatttctcctgtctgttggtccaatttgaatcttaaggcgtctttcaactggaattttttgtttctctcaactaaaaattgttctttgtaagtttgaatcagaacaaaatcctgaatgttgagggtttcctaaaggctgtttctttatgcaaaagcctgaaacccgatgttgatgttggctgcttaaaattaactgtgaatcaaggcagggtttttatttttattttttttttactttaatgattgtgttaattatagtgaaaaccttgagttcacgagaaagaaagcctttggtcaagtattgtttattaagttgtcagtcttgttgcaggatttgcaaatttagtggaattagtgccatttttcagtttacaattccagtcacatttcacatgatcagagcatggctttcttctctgtggagcaaatagagggctgtctgacacttggttccagtggcttccattaagcagagtggatatgtccctggagtctgcagagaagggcatggcactctgaccccagatggcactccgttttgggacattgtccaattctagttcatagcatatgtgaccaacaccagctctcacctgatgtaaacacttagcgcgttgttgcttgggggattggattgtgtgaatttttcaaaactacagttgacagaaggaggctaccaaaaatgaaacccaataattccatttttgggaattattcccacttttgttccatttttcccactttgttctttggcacacagaatgtttgatttgtgaaaatcttaataacagtagttttttctataaggaacactcagaatcttgataatattggaataatacagatccttttgtaggatcctctcagacctcatataatagagttcatgtagtcaatatttaaagaaaaacacccttaagtttttgtttttcagaatcacaagtaagtggatttaaacttgtgatcttattcccctttcttctcttaatttagtgaggcagccagcgagagggtttgttttggttattctaaagaaggagtttgcttgtaagttttggagggcaagacttagactctgtgtctctgtgcttgccctggaactttgattaaattgtcactaaccgagttagctggccctcgccgggctgcagaaatagaagtgtcttgcacacatgacatatgactgtctcaagagctggctggtgaaaggacgttctggagaaggctgccgatactgtatgaactagaactggacaagagcctggagattggataactcagtttggcgcaagtaaagggaataaaagtgttaaggtggcaaaattgtatccaggtgtttataggctccctgagttcctgacttgagcctatctatgggtttagagttcaaggctctttaccagtgctgacaatcttatactcyaggttgaacctccggggaaggtgcccttgcttgatggcatgtttaccaggggttctagagcctcaatcacagattctstctagctcacatgaagttaatgaaaatgaatgtgcttccctacaaattagagaggctttgaggaaaaatcagattaaatgcactcctgcttgaacttatgtttcttagaacacagctggaaattttgtcacacaaacctttactttcagtgacatttcttgactggtttgttactgtagtgaatctgctttaactatcttttcttatcgctgaggttttacttccattctacatgtgattgtggagcgctgcgtcattgtgggttcagtgtagtggagagtaggaagatggtgagacacagtagcttgttgcacattgcttaatttatcagggatcactgatgagttagtacactagagaagattgtaggtagagctgaaaagatggaggaattataaggctcagatttctctctttttttttttttttaagatggagtttcactcttgttgyccaggctggaattcaatggcatgatctcggctcactgcaacctctgcctccygggttcaagtgagacttgatggtctcacttgatggtttcctggctcagcctcctgagtagctgagattacaggcacccactaccatgcccagctacttttttgtatttttagtggagatggggttttatcatgttgaccaggctggtctcgaacttctgacctcaggtgatcacctgcctcagcctcccaaagtgcagggattacaggcatgagccactgcgtctggccaaggctcagatttctaatagagatttctaatggacatagaggctggaggaaatgggatggacaggaaaactgagtcaggtgccaaaaacttgtagggggccgggtgcggtggctcacgcctgtaatcccagcactttgggaggctgaggcgggtggatcacgaggtcaggagatcgagaccatcctggctaacacggcgaaaccccgtctctactaaaaatacaaaaaattagccgggcgtgttggcaggcggctgtcggtagtcccagctactcgggaggctgaggcaggagaatggcgtgaagccgggaggcggagcttgcagtgagccgagatcgcgccactgcactccagcctgggcgacagagccagactccatctaaataaataaatagataaataaataaaataaaataaaaacttgtagggaggtggcagtgtgctatggagrataggtgcaacctctgtgagaatgtagagaaaatagtataagtgagtggtgaggacccccaagagggggttttatagtaaaacaatggtcagaagtggcaacaggataccgtataatgctttcacctctaccaatgcactgggtactggagagcgctccagtttgctctggaaaggccctttctgtggacaaagaatacagaaaagagattcctttaataaaccacccactctgtgtcccacccttgatgaatacttcactgtgaaattgccagaattaatcatggtaatagctactgtacacttactttgttccaggaactggataaatgttttacatacattatcagttctattttttggagaagatacaggggctcagagtccctagggttccagagctggtgagtagcagagtcaggattcaaacccagctttctctgactctaaaacctcctttcttcctgctgaaacaattaactcaagacaacaaaggagttaaggatttggggagttttctgcatggtagaatagacccaaaggaaaagaaagaaagacagtgactaagatttgggtttgtctgccccaccaaatgctttgagcastttcataaatataaatccttcaggttgggagaaggttgaacatctgaagacactgattcttcagagatgtaatccaaacaaagtgatctttggtgatatggtcactaaaccatttatcccaaaattctcttggaaaaccgtcctataacagcagggaacattatccagccaagtttttctgcaaataaagggttgctgatagaggcttgcctgcttgtgtttctgtagctcagggtgtttatgaattcactaatcccttcccttcagatcccttttattctggtgttatgattgtgactgaaaaaaattgattttttttctatgacatagaatgttgaaaggttgatttcttttctagaggaaagattctttttttctatgtgctacataccccccgaccagggaaaaggcaaatagtggtattgtttgctgaagtcttcctttgaaggttgcttggtgtttgcttagtggaaatcagcaggggaagagaggctatctctaacattttgttagagtttcttcgtagttctatagtgatgaaacaaggacttggggtacaggacagatctgctttcagaaatcctggctcttgtgaggtttagaagccctgagaccatttagctggtggcaacgggaatgttgagggtgataaataggatctttggttgtccaagtatcagtgacatgatatagatggagttaaacctttaggatctccttatttatttgtttgtttatttttgagacagggtcttgcactgtagcccaggttggagtatggtggcatgatcataactcactgcagcctcaaactcctgggctcaagcgatcctgctgcctcagcctcccaaggtgttaggattacaggcatgagccgccacacccggtcaggatctcctgtaaaattatattgttgacaacatgaagaattatgcttctcaaaagctagttatagatttgtacaatattcatagatttcttgtttcagtttttacaaattcatagcccttattttgaaaattagctattagcaataattttgtctaggaaattggatgtgtattcaagtgaaagaaggaagtacagttacctattatcttattgtaactaacaatcaagtaagtgtgatgcatttggtactttaaaaactgcacccaagttacagattattggaattaataaaattcactggatctatatatttttaaacggacagtgtgatagcagaacctcttatagaatgatagaattcctctggaatgattggataacttcatttcatccttgacttttaccttggaggatttcttaccccttttggcttctcaaatttgactattaaaatgttgcctttaaaaataggaacacagtttcaggggggagtaccagcccatgacccttctgcaaggccccctaactcaaggtagtttccctggaactgtggtttatggaatgtttcaggagtgtgaggaggtataatttaaggctgtcctagcaaggatacccttaaggatagagggcccagtagcatctggaggccagaaaagttaaactgaggcagtcagattagcttcaggctcaattaagctgatgggtcagcctgggagaaattgcaggatgactctcaatatcccctcccacccccacagcagccacgatctgtctgtctttaatcatgggtgcagtgaacctgttctttccaggtgtcttggccttcagtaaccttgttaggcttgtccctgaacgtggctaccgatccaaagacacatgatcagagaggcaattagagaacagaccttttccaaagcaagcatgttctgttgggcttagaagtttcatgtcctaatattataggaccctgtgcatctctctggagatgaggcacatgagtcatatctgtgattcttgcttttgtgtcaacatctcatgaataggcaatcagagctttggcaccaatgtattttcagttcatatctgatgtagttaaatccacctcctgctttgtagtttactggcaagctgtttttgatataagacatctagaacactgtaaatatataacatttttatttgtctattatacctcaattacgaaaaagacatctagaagcaacctcatcaagagagatactgaggccgggcatggtagctcacacttgcaatcccattactttgggaggctgaggcaggtagatcacttgaggtcaagagtttgaaaccagcctggccaacatgttgaaaccctgtctctattaaaaatacaaaaaagttagctgggcttggtggtgggcacctgtaatcccagctactccggaggctgaggcaggagaatcacttgaacctgggaggcagaggttgcagtgagctgagatcacaccactgcactccaacctgggcaccagagtgagattacatctaaaaaataaaataaagtaataaaaaagagagatattgatagctgttgttggaaatttcaacttccatctcacttctggtaactttttggaagtttgttgaacaaagtggaatacacgcacatacacacacacacatactctcttgtttgtttaaggtttaatgaaatagctgtcatataatcactgtttttgaaagaggagaattagttgctatctgtacattttgggtatgtgaactatttggatagaactctgagaaatgcattcagaacaacaaacaaaatcataggagaaatagctaagtgggaaggggcatataagagttgttgaaaaagttatttcttgagaaaccagctctaatgctaggcaagtcacttgctttgggggaggcctcagcttctctgtctataagattgcagcaggggtgtagtgggaatgagtcttcaacattccaagagattttatctactaatacgacmgtcaaatggagcatgactttgtggaagyctctcctcttccacccagaggggccaatttctctgtcccagtgagatgttgacacttgtatgatccctgcttggagacttccctcttctggaacctgccctggctcaggcatgagggctgactgtcacccttygataggagcccagcactaaagctcatgtgttggcagtgttcttgcgggaaggaaaaagaccagccagcccatttgttactgcacaagcaaacagcttctggtagctgtacagatacatgcactttctttcctcactgtgtttccatagacagatttagtgctgtagaagagtagagggcagtcacgggaaggagttcctgtttttcttttggctatgccaaatggggaaaaatcctcctatcttgtctttttagtgtcatcctctctccccttttcttcttctttataattctcatctctcatctctcctggaaatgtgcatgtcaagttcaaaagggcacaatgttttggtgaggaagaggtgggagaacacgtgccaggtgctaactagggtcatcatttcccccttcacagccagcttcctgtgaaygtgtgtgtgtgtgtgtgtgtgtgtgtgtgtgtgtgtgtgtgtatttcttttgccagcatcactgaatctgtctgctgtctggtattccaggttttggtttagggaaaagtaaaagtaattttataatcccagctgtcatttaagccacccctttgtgggtagcatatggtccactctctcagttcattgtcctaaagatgcttcatcagaaaggaataacttccaccccgttactctctgtccccttactctgctttatttttcttcgtcartcctaccaccaccacccactgtttgaacaacccactattatttgtctgtttcccatccctggtagaataggagccccatgaatgaaggaactttgcttctgttgttcaccactgaatctctaaggtatggaacacacctggcatgtgataggcactcgataaatatttgttgtggctcatgggcaccttgcagagttaaggctgcagttgtttgtggaatttataagtggtaatgaatatttatctactattcctcttccaaggcgatcacacaataatcaggctttacactatccagttcttaggtcttccaagttatgacttgtgaggtatgttaattatgataatagaaggcagtttatttggttcagatttattgatgtgtaatttaccacagtaagacttcccctttacaaaagtatgatgagttttgacaaatggatacacatgtgtatctaccactgccatgctccttttcagtctgtcgtcccctccacccrtgaccactggtcaccactgcagtgatttctgtccccttcatttcaccttttccagaatgtcatataaatggaatcatgcagtatgtagttttttgtgtctggcttatttttcttagcattaggcttttgggattcatccaggttgtcgcatgtaacagtagcttattcctttttatggctgagtaagtgtcccagttttatttatatatttatttatgaggaggtgtctcactctgtcacccaggctggagtgcggtagcgcgatctcagctcactgcaacctccgcctcccaggttcaagcaattctcctgcctcctgagtagctgggattacaggcacccaccgccacgcccaactaatttttatatttttagtagagatggggtttcaccatgttggccaggctgatctcaaactcttgacctcaggtgatccgcccacctctggctcccaaagtgctaggattacaggcatgagccactgygcccagccccagttttatttattcaccagttgatggtcttttcgacaactaattgtttccagtttttggctattctgtataaggcttctataaatattcacaaatacctaggatgggatgactgggtcatataatagtactgtataaccttagcagaaactgtcaaactattttccaaagtggctcttccattttacaattccacagtgtattgagtcccagtgtctccatacacatgctagcacttttaatatttaatttagtgggtatgtaatgatatctcattgtggttttaatttgcatttctctgcagctaatgatgagtgtttctgcttatttgggaaggttttaatttagcagtctgttgtattctgtagatattaataacttcaaaatatcagtggcatttgcagttaaaatttccttaaaaaattggccaaaggtttccagcagtcacttctgccatgcccaaactgtatgaaacaaggctgaggtgtggagattgtcacattttggcaaggagtgatccacttgggtgactgatgagacccagagagcgtacgcctcgggcttgagggtgaggacgggcgggaagtcgactgcatggccctgctggccttgggaggctgcccagtccttagctaaagctggcagttatgggaaacagacttagattctattacgtttttcaggatgtcccaggagtcacctgggaagctcagcagtcctttgtgactttcaagcatatggtagaagctgctgaacacagagmtccctctttggggataatttgcccaaatcatttaatcaggcttgagaaatgagttaccacaggtccaggagtgctgccacccttgaattctgacaccctatttctcctatccgtctcttaattaattaagcagacatccccaagtgcttacgacaagccaggacccttttgcatactaaggaaaacagggatgaaggaaacagaaatggtctctgctctgactcagaaggtagaaatcctctttcccagccaagtcttcctagggagcacgtaggaagggctctgaacccacgtgtcagttgcaggggaggatatcaggaaaggacattgaagaagtggagacctaagtttgagacctaggcattagccaggctagcagtgcttgaaaaagtgtcttaggacaagagaactcaccagtgaagtcccagtggtaggagagcgtgcagcatattctgagcctgtatacacatctccagggcattgcttagcaggtggggagtggcaagagagtaggctggagtcacagaagggaggccaggtagaccttggtgagcactggactctatgttcaggtgctgaggagctggcaaaaggttttaagtcggggagaggcatgttcagatatttggtctagctgagtaactttgggtgctctgtgacraatggttgggagaccagtgaggtggcagttgcggtcatctaggagcaggatcagagtggcctattgactgggatgactgtgaagtgggatcctttccagccagtaactggaaatgtgtatgagggcagaagtgagtgtactgcatttgaaacattgagaaatctagtrcatagtactgtctcttttatatcttttttttttttttttttgattttggtttgtttgttcactaacttggaaaactgatgtggaaatgtccctttggcttcagttacctgagcagaaggggccgggcattgccaaactctcctcttaggacagaattgctcccagtattgatcattgtgttctgagwtgggggagcaaattgtgcaggaggccaggtcagtgccaaggtgggtgggaggaattggagsaggaagcttgcctaagtgtgcccagcaaagccacggtagaactttctactgtggctctatgctacttcttagcaaccttctccatgtgcttcctggagagtccttggagtcagaacctttttcttgaaacccagacactttacttccaagaaaatgctgtccaagaaaactcatccttcccttcttctcatgaacgttgtgtagaggtgtgtcttctcttcctttgagcttttccactcagggtttaggggaggtgatattctatatttgggtttggctctgggtactgcaacactaggctattaagatttcatccttactgctttgcccctcctatctttccagaaacccacaatggatttgctagaaataatggaacgtcctgtttggacaggatataaccatttctcagctagaggatattgttggaatgaagaaagataaatggggagaagggaactcacattgctttggcacttaaattaagccatgtactgtgttgggaaattatttatattatctcgttgaatccacagtagaacacagttgaacaccatacaaggtaagtattgtcatccttattttaccatgaggaaattgatgcttagagagcataaagccttggccaggggcacatagttgggaagccggggctaattcatgcctgggctctttctgatagttttccttttttaattgtcccctcctcattgttaccttggggatttcaagagattcatgtagcttctaaatcaacgaastgattcctggagagcagcttctgtatgagaaaaatctagctaattatttatttcagtgtctctggaatgcaagctctgtcctgagccacttagaaaacaatttgggatgacaagcatgtgtctcacaatgctgctctggttgccagtgctgtgctgccagttgtcatctttgaacaaactgatgcagtgctggtttaactcttcctctttttggagtaagaaactttggaggcctgtgtccttctagaagtttgctgagcaaatggtaaggaaaagaaataggtcctaaggcttgactatttcagagaatttcttgatttattggactgtcaatgaatgaattggaatacatagtggtaggctgtcttttcttctcagacactgcaatttcctccaatctcttgacttttctagaagttttaatccaagtccttgttgggtggtagataaaagggtattgttctactagagactgaccttggcatggagatctcatttggactcacagatttctagtctagcgcttggttttgtatccatacctcgctactgcattcttagttccttctgctccttgttcctcatgcccagtgtcccaccctacccttgcccctactcctctagaggccacagtgattcactgagccatttcataagcacagctaggagagttcatggctaccaagtgccagcagggccgaattttcacctgtgtgtcctcccttccatttttcatcttctgccccctccccagctttaactttaatataactacttgggactattccagcattaaataagggtaactgctggatgggtggctgggatacacagaatgtagtatcccttgttcacgagaagaccttcttgccctagcatggcaaacagtcctccaaggaggcacctgtgacacccarcggagtaggggggcggtgtgttcaggtgcaggtggaacaaggccagaagtgtgcatatgtgctgaccrtgggagcttgtttgtcggtttcacagttgatgccctgagcctgccatagcagacttgtttctccatgggatgctgttttctttccagagacacagcgctagggttgtcctcattacctgagagccaggtgtcggtagcattttcttggtgtttactcacactcatctaaggcacgttgtggttttccagattaggaaactgctttattgatggtgctttttttttttttttttgagacagagtctcgctctgtcgccatgctggagtgtagtggcacaatcttggctcactgcacctccgcctgccrggttcagcgattctcctgcctcagcctcccaagtagctgggactacaggtgcctgccaccatgcccagctaatttttgtatttttagtagagacggggtttcaccgtattggctaggatggtctcgatttcttgacctcgtgatccgcctgcctcggcctcccaaagtgctgggattataggcttgagccaccacgcctggccgatggtgctttttatcatttgaaggactcagttgtataacccactgaaaattagtmtgtaaggaagttcagggaatagtataagtcactccaggcttgaggcaaaatttacaaatgctgctgactttgtatgtaaggggaggcattttcttagaraagagaggtaggtctctgggattccagtatgccatttccatcctcagtgtttttggccacctgagagaggtctattttcagaaatgcattcttcattcccagatgataacatctatagaactaaaatgattaggaccataacacgtagctcctagcctgctgtcggaacacctcccgagtccctctttgtgggtgaacccagaggctgggagctggtgactcatgatccattgagaagcagtcatgatgcagagctgtgtgttggaggtctcagctgagagggctggattagcagtcctcattggtgtatggctttgcagcaataactgatggctgtttcccctcctgctttatctttcagttaatgaccagccacggcgtccctgctgtgagctctggccgctgccttccagggctcccgagccacacgctgggsgtgctggctgagggaacatggcttgttggcctcagctgaggttgctgctgtggaagaacctcactttcagaagaagacaaacagtaagcttgggtttttcagcagcggggggttctctcattttttctttgtggttttgagttggggattggaggagggagggagggaaggaagctgtgttggttttcacacagggattgatggaatctggctcttatggacacagractgtgtggtcyggatatggcatgtggcttatcatagagggcagatttgcagccaggtagaaatagtagctttggtttgtgctactgcccaggcatgagttctgatccctaggacctggctccgaatcgcccctgagcaccccactttttccttttgctgcagccctgggagccacctggctctccaaaagcccctaatgggcccctgtatttctggaagctgtgggtgaagtgagttartggccccactcttagagatcaatactgggtatcttggtgtcaatctggattctttccttcaggcctggaggaatataataactgagacttgttttatttctgcagagggttctaagccattcacttcccagatgggccaataatgctttgagtaatctggagatcatctttaatgcgcaggtgaatggaactcttccacagagggatgtgagggctgtagagcagagtgaactccctgaaactcagacgtcagctctttgtctctctatctctgaacacccttccttagagatcccatctctaggatgcatttctctgtagttagtttctaagtctcttgttcctgttctgcctttatttttttttcctggattctaagccagtatccccacttggctgtcttaatgtagcttaacatgtctgtaatcaaaatgatcatctttctgagattcaaagggctataagggactttggagagaatttcattcagttttcctcaaactagaataatgcttgcactgtctgtaaaagaacaaaagtgtcaaagcayccttttgttcactaaatttccttttttattatagtgttacttaaatattaggaagtaaaagtaggtataaacttcttataggctgttattatacaactatatgacccatacatatttacaaattaagtgcagccaaaattgcaaartcaataccattcaaattaataccttaaatgtggtgaggcagctgttgttcaactgaaaccaaattataagttgcatggcagtaaatgctatcatgctgatcattttgagtttggccagtctatattatcatgtgctaatgattgaattctccacccatttttctacttgtatgaccttaatttgatggcacctgttccatcctcatgagtttgctacaattatactggtgccaacrcaatcataaacacaaatataaacttgggctttgaaatcttgtgccagaacttggctttaaagtaagcatttaaaaaatccatatgtgtttattagactttgtttagatgactgttgaaatgaaaacaaagtgtttaaaatcctcttagagaacttaaatataatccctcagcaatatgtatacagatcttcctttgagaaaaactgattgtgttcagcctctcatgttacaaatggggaacctgaattctgaggtctctagtgagagaacagggactrgaatctgtggatcctatctgttttaataataattgtaaagtataatagataatattatattaataaaataaaagcaaacacttagaatgagcttccatgtgtgaggcactaactgattaggcattattaactagatttattccttttaaggccccgcgatgtactgttatttccacatgttgtagctggggaacgtgctactcagagaggttaagtaacttgtctgaggtccacaccactaacaaggagcacaggtagggttcaaatccagataatctgactttggagctggcactctaactcaatgtgcctaatcgcttttcagtggtgtcattattttgcctattctccatctgagaatattgaagtttctgactccttccttgcctttctccctgcctcccgtgkttatccccaggtcttggtgttccagtcctctatgtccgtccttactcttattcctttgctacagtgtgatccagggctcctgccccttcttatcctggtagagggggcccacttgctgggaaattgtctccgccatggtttatccatgttgtgtgtccattagtgagtagtgggaagaatcatatcatgttggcaatgaaaggggggctatggctctggggtagtctagtctgaacctcttattttacggatgagaaagctgaggtacaaagcagggaagggatttcttgaggtcacccagccagcaactgagctgcaaccagaagctgagatccccaggactagggccgagcctcattctgtcccatcacagtgacttttcttccctcctccaaactatttttattttttatttttttgcagctgcttagcagcttgaagttagaagaaagggcagggaaaaggttttccgtgcttagccagggaaggaatcctgcaacaggatgtggggttgggtcattcaaattgggccagactccactggtcttgttgcttcttgcttggtattgcagatgggtttaaaagtgttaggattagagagataggcaggtttagccaaaggcagtttgtagccttgtggcagagttctttttaaagaaggaagtgggatgcaacaccctgacacaaaggggcttaagttgttataccactgcctgctaacctgttttccttaactctcttcctgatttctaaaggaagtatattttgctgaatcagaaagaaaagtgatttatttcargttgctgatgcttagattgttagagttgsaaagatctggcttgcatcttgtacarctgacagaactggggctcaggggggcacaggtgcccagagttggtcagtcaggaaagtagcaccagaaccagtctcctggtggccctacagttgcagacccttttttgctttgctctctgtgtatactaaagcttctatgtctctgaatctcaagttctgactggtagctactttccaatccacctggcttagatttctagattatattgtttagacgtcagaacctcttaagggttttggggccacttgttagctcacatagtgagaaccagccctgcccattaggtaggggaagaagttagcagtccatgatagctgttgcctgcagcrtayggaygttcattgcrcagttcctgtctcctgagatcctggagtgtatacgcttggcctcagagcccagcacagagcctggcccttgggacatgcttagtaagtatttactgaatgagtgggaaatgtcttaaggcccattagtttgcaggtcttgaggaggctcccttgcactaggaagaatagaaagcatacataaagcctgtgtgctgcygccaggaagactagaaacgctatgttcagcctggagctgaatggtataccccagagcaaccctgttgaaaggcagtgcttgccttttcattctgtgtcctggtttgctggtaactcctgggtcccctgcctctcctgtacccccattgtgcagactgaggggggaccatcagccagggttagttttccgctgtttctgttaggcaaagaataaattgaattgagttgtgaaagttgggtgcaaagctcagtttgggtccaaagtaacagttaacttgtgtgggtggcaggtattcagtacaaacagggctggggacaggaaggggaagagaacttcagagctttcacgatcctcatctggttttaggctgatccagaggccaaggtccccatggaacaaactggacaaagtgagggtggccacatggcctcttttcttttgcctttattattaattttctcaaatagatctgactagtcatgtggctgggaaaatagttaattgtgatttttttttttttaaactgagtctcactctattgcccaggctggagtgcagtggtatgatctcagctcgccgcaacctctgcctcccgggatcaagcaattgtcatgcctcagcctcccgggtagctgggattatgggcacacagcaccacgcctggctaatttttgtatttttagtagagacatggttttagcatgttggccaggctggtcttgaactcctgacctcaagtgatccacccacctcagcctyccaatctgctgggattacaggcatgagccactgcacccagccagagtaccactatttgggcattctttaatgaaaaagaatgaactatccaaaaattaaaactcctcatttatgagcttttagagaattttacagagtagatggaaactctctgcatcctttccccacttctastttcacctgacacatttcttccctgtccttactcctgggccggcagcagtggtcatgattccaatcccagcttggccaccatctgcctcagtggcctaggaaaactcctttctccagagctttagttttctcttctacggaatgaagaaagttaaaacaaatagacatttattgtttcatttggataaatatctattaagcatctattacttgtggtatggttagctgggtatatagtggtgaagcagctgggcatgagtactgctttcgtagagcttacagttcagtgaggccagcagatgtgaaacatatcatcacacaaataaaaatataactatcaactgtgatgaggattatgaaggaaaaaatccggcaaactatggtactggtgttagatactagcaggtgtgggtagggatttcatttagattkacaggtygtcacattaaagctgagagccctgaagttcaagcaatggttagccaggcaaagatcagaggcytagagatagggaaatccattccaggcagagagactgggggtgcctgtcccctaggtcagggaacagaagaaagccagtggcactggtggagtgaataagactggcgggggatgagttggtagtagacatgaccagatcatttagggccaattctcctggggaaggagaatttaatttaatatttatttatttatttatttatttatttatttatttatttatttatttttcaagacggagtctagttctgtcgcccaggctggagtgcagtggagcaatctcggctcactgcaacttttgcctcctggtttcaagcgattctcctgcctcagcctcctagtagctgggattacagacgcccaccaccatgcccagctaatttttgtatttttatagagatgcggtttcaccatattggccaggctggtctgaaactcctgaccttgtgatcctcctacctcggcttcccaaagtgctgggattacaggcgtgacccacagtgccccctgagaatttaattttattttatgtgcaagaggattccctgaggtagtcaggccacattgtctggtgactcttgggatagagggaacttgaatgacaaaggcccaagaaagcaattgtaatcattacatatacatggaccattttatgctgttttcttctttcatttaacattatttagtgtgcgtgttcacatatttctaaatcatcttctgatttagaataatgatttctgatgtgtaggctgtgttttatagttttgaaagtaatactttgatatccattactttcttgattctcacagcaattctgaggtgtatgcgttgcaatttctgtttcacagatgaagagagtattgttaataagttaatggccgggcatggtggctcacacctataattccagcactttgggagaccaaggtgggcggatcacttgaggccaggaatttgagaccagcctggtcaatgtggtgacacccatctctactaaaaatacaaaaattagccaggcgtggtagcacttgcctgtaatcccagctatttgggagggtgaggcaggagaatttgcttgaacctggcaggtggaagttgcagtgagccaagattgcaccactgtactcctgcctgggtgacagagcgagactctgtctcaaaaaataaaaagttgctaagaggagggctgggatcttttggctccaaatctactgtgggatgatgcctttgacattcctgatagctgtgcagtaatccattaacacagtttttataagttcaaaccctgttgccaacatttagattgttccatgtgtgctgttacaaataaattactataaagattctatacatttaatcttttattatttttgtattatttctgtaggccaaaatctgaggaacaggattactaggttgaagggaaatggcccttgaagtgtctgatcagatgtctttccagaggatccaaccaatttaaatagccaccatcaatgcatgagactttgtagttcagggaaggcaggcctggttttaaaaatcatttcccctctctagcatttttctgatgtgatccttaagatttcactttagttttcccaggtctcattggcatgtatgctgttagggatgggtctaaaattaatttttcttcacattcatatcatgtcatcccagtgattatttaataaataatcacttgattaaatagtgattccttttctagttatttttgggacatttattaaaacctggatatggtggctcatgcctgtattcccagcactttgggaggctgaggtggggggattgcttgagactaggagttcaacaccagcctgggcagcatagcaagactccatctctataaaaataaggaaattagtcaggcatggtggtacttgcctggagtcccagctacttggaaggctgaggtaggagaattgcttgagtccaggtggtcaaggctgcagtgagctatgaccatactactgtactccagcctgggcaacagagtgaaactctgtctgaaaaaaaaaaaaaaaaaaaaaaaaaaaaaaaaaaaaagatgtgtagggagcaattttggagttattcatttggtcatttgatatgtagttttagttttggbgctgatagagcccagaatktaccctgaatttgatgaacattctgatatatgggggagctcattgtcccccacttacctttttgcctctcagaatatcttttgatatttttatctgttttttccccattgaatgttattaccttatcaagctcaaaaaagtaccctatcgctattttaagttcagttgtgttaaatctataaattagcttgggaaatttggatattaaatgaactcatgaagaagcagagtttagctctccttaattctcatcttcctttatttatcctactacagttctgtggttttcttttatgtaagaagcacatgtttggctaagttaatgcctaggtttttttgtttatgtgtccattctcactgtggatagtattctcttttccccacattatattaatttaactggttttcagagactaatagcaatgctattatttaggagaatttaccttggttctgattaacttacccatacttgcaaatcatttgcagctttttagttaactttgtgagttctcttagatttaygaccatgccagaaacagaaaggatattttcatctcttcctttctgatgtttattcttcttgtttcctttttttatcccccattatattctcaagaatctctcaatactaagaaatagcgacttcatttttcagcgcrgagtgcattattttggctaccatgattcagaagcctcttgcctaaggcccaattttattctgctagttttctctgttctttgtacatggcccttgcgctgccctaaccttgaattaacgtggctaaatctcaagaatttaagagcaccgtgactgtgtcctcaggctagggagggaaatgggttcacagagtgactggattgtggtctatgaacttcggcagccagcagcaaaagtcaggcatgaataatcaagtggacagtgaacatctgtagtgtgggagatgttggcataactatgaatgatgattcaagagtggtttgatgcatattgaataacatgatgataagtactagactctgtgctaagccttctatgtgaaatacatttaattctcataataactctagagcagtggttctcraccggggccggttatccccctaccccaccccaccctcacccttccaccagggacataacatctggagatatttttggttgtcacaatcctgggaatgtatgtgctgatatttagaggttgaggtcagggatgctgctgaacttcgtagaattcataggagagtctctcacaacacctatctggccccaaatgtcagtagggtcactatcaagaaaatctgctctagcagtgcctgctcatattatccccatgttgaaatagcaagatgggaagtgcaaagtggtgcttcggtactcttggagcagctttgactttggtgagaaacgccttttawaaacaatgtttcttcccatcttcccaccccatggggaggtgtggggttgggtgggtaggcaccaaagcaagatttagaagagttttctgtaggaatttataatggtaaaggatcaacttcatttccaagctattyatgagggtttatgtttaggaaaagtgctaagcttagagaaggaggagaaatctgattttattaatgagtgtagccataatggcatatcctggcagaagtcaastttggtttctagagggaggctattatgaaaagaaatacctggaacattcccctgggtttggaaggtgagttctaggttcaatgatgggaagaattttagaggtccaagataaaagggcaaagattaaattttgtctctcatgagttctctggctcaggtggtgtgaactttgcagacagtctytttaattcactcatacatgctagtctcccagctcagcaagggctttgagagagcaggtgtctgtatgctctggtaagtgaaggcaaagtgcataaggaggttggggtccataatggcgaagagaaggagcccttcagtcagagtggctttgaatcttggctctgccatttgccaatcttggaccattgggcagtgtattaactctttgaatctcagcttcctcttctgtaaaatgtgtataacaagagtactaattggattgtttgatgattaaatgagttaatgtgtataaagcactcacaaccctggtacatagtaagacctttcattattattatcatcatcaattttttttaacctcttttcctgatctgcttacactcaccagcttcagctgctccaaatggcttgtaagattttttgtttgccctttgctgtcagttgccatggggaagatccattcatttttttcagtcaaccaacatattttgagcatctgctgccctacaggatcctagatatgggggctgcagagatatccaggaacataagccttgattaattgggtcagatcagtgctcagcagggctggcaagtgctaggtttcttttaagtggcatatcttaaaaggtatatgtcctaaacatagctttgtgatggcagcatgatgggtacaaaagcacacacttaagtgtcagtagatctgggttcaaacattggtgcagtttcttatggctcgtaacttgttcaaacctcagtttcttcacttctaaaacggtaatgatacaacctacctcacagggttattatgaattaaatactggagatgagatacacaaaacgtcttgagtacacagtagctgcccaatattggctgtaagtattataaatctacaagctgtgaattaattttacctctstggatcctgttgatatttctagaccatkccacctagtggggccatttcctacctgagtcacccgtggtgtcaaatagaatgtcatgtggcctcctgagttgggtagaattggctgctcatctcaaccccgctactgactatctctgtgatttacccttcctccagccttagccttgctacatataaaatcaagacaataatrtttcctatctcacagggttgtcctgaggattaaattaagtaattaatataaaatgtgccttgtacatattgggccctaaataaacagtagctactatttrtccttaaagtacaaatggtagtttcagagcttcaaggctgatggctatttatcttactcatactctttgtttagcttcatttttttcccctaatttcattagtattttcttttcttttttttgaggtgaagtctcactctgttgcccaggctggagtgcaatggagcgatcttggctcaccccaacctctgtctcctgggttcaaacagttctcctgcctcagcctcccgagtagctgggattacaggctcccgccaccatgcccagctatttttttgtattttcagtagagatggggtttcacccttttgaccaggctggtcttgaactcctgacctcatgatcaacccacctcagcctcccaaagtgctgggattacaggtgtgagccaccacgccmggcctcataagtattttctaaatttatttacagtcatgccatttaaaaggaaagttgtattcctgtctttgttaatatttataagtgattttattcagctacaagcttggaatggcatataattttgtattctgcttttttcacttaatattacatggctaatgatttctgtgtttcataaacattattctgatgatggcatgatatattgttgagtacatgtaccataattgaatcatttccctattgctatgcaattaagttgtttccaatattttgcaattataatgtttcaatgaatgaataactttatgcatatagctttttgatatcttaagttcagtttcctaggatgaatttccaggaatagtaattgggcaaatgggataaacatgactcttgaatacgtattgttaacattgctttcccaaagggctcaactgatttatatttccgtgttcattatcttttaaaccagctcatttactcaccaaacatttttaaagccattatcatgtggtaggcttagtaagaagaaagtgaccctaagggagaagcttatatataaatagggtccctggtgtaccaagtgctgatacagacacaaagtacctggggaaattgagatgagggagtcctggctcagctgggagaaaagttcattttcatagagtcatggttttgttctttggcagaaagaaaattgctttcttccccacccccacccccagctttattgaggtataattgacaaataaaaattgtatatctttaagatatgcaatgtgatatatatgtatatctcaacttaaaaaataagctacagaataaaaaggtgtttgctattaaaaaaaaagaaaaggctgaatgtcattcccaagcttggaaatttgagtatgttgcctctttgggattatttacagaaatattagcaagaccagccccatctttggtcttgagtactccactgtcagcatgctttcttccagagagggatccatttgcctttatttttcattctgttgtgccgtctatgcaaactattcttgatagttttatggtaacagtgtttttttgttccatgagataatttatacatgctcattgtggaaaatttagaaaagacaggaaagtattaaaaacatcacttttttttttttttttttttttttttttttaagagacagagtcttgctctgtcgcccaggccggagtgcagtggcgtgatctcagctcacagcaacctccgcttcccaggtttaagtgattctcctgcctcagcctcccaagtagctgggagtacaggcatgcaccaccacgcccggctaattttgtatttttagtagagatggggtttcaccatgttggccaggctggtctcaaactcctgacctcaggtgatccgcctgccttggcctcgcaaagttctgggattataggcaggagccactgcgccagccacacctacgttcttatcatcctagtacatccactgtcattatcttgctgtatttccttctgcccagtctcactctgatcatgcagtggcgtgatcatgcagtgatctcggctcactgcaacctaggccttctgggttcgagtgattctcctgccttagcctcctgggttcaagtgattctcttgccttggcctcccaagtagctgggattacaggcatacacccccatgcccatctaatttttgtatttttagtagacacagcgtttcactaaaattttgtatttttagtagagatggggtttcaccatgttggccaggctggtctccaactcctgacctcaggtgatccgcctgccttggcctcacaaagtgattacaggcatgagccactgcatccatcgccaaaaagattttttaaaagagtttaatgtagaaccatatcaaaggtctttggaaataaaaaacagttttttaaaaatatcagaaataaaacaacaaataaataaataaataaaaacacccaaaacaatctgaagcaygagcacctagcagaaaggttcaattatgatctattcatagagtggaatatcaagtagacattacaggacatgttttaagattatattttatgtcatgggaaatgctctcccagtatgatgttaaatgaaaaaacagaatacaaaagtatatatgctgcatagtctcaatattgtagagaaaaaatattatttatgtatgcatgaaaaaagacaaaagatgttaacagagatccattgttacttcagtttactagggattgtctctgggaggtaggattaaggtgatttatatttacctttttaaacttttctgtatttttttattttcaaattttccataaaaatataaggacttgaagatcaagaaaaaatttctgctttggctcagtgcagtggctcacgcctgtaatcccarcastttgggagccctaggggagaggatcacttgaacccaagagtttgacgttccagtgagctatgatctccggatcskaccgcctggacgatggagcaagaccctgtctcaaaaaaaaaaatctttgctttttttttttgtttgtttttgagacggagtctctctctgttgccccagctggagtacagtggcacaatctcagctcaccgcaacctctgcctcctgggttcaagcgattctcttgcctcagcctcccaagtacctgggattccatgcacccaccactatgcccagctacttttttgtattttcagtagagacagggtttcaccatgttggccaggctggtctcgaattcctgacctcagctgatccaccggccttggcctcccaaagtgctgggattacaggcatgagccactgtgcccagcccaatcttttgctttttttaaaaaaagaagacaaaaagggattttataccagtattatcttggctgtgtgactctgaagccacagttgtaagttataattactctgaaacacaaggccctrtgactcttttgggctctttggtgtttatcttgattacaacgttggaatatagaaatgaaaggaatgggagaggtgatagacttcaggcagtgtaactagttgtctgaacactactggctcaattatattgtgtctagtgatttccatcttgtccgtckgctaatttatcgcctggtaactcactgaggcagggttttcctttggagaaacctcattgttttaaccagtgtatcatgcttgtttagaagttcaatgatctttttaactcatcggagaagatgatgaccagacctggacagatggggaaggactttgcactctctctttacagtcctgagtgcacacaggtcaatatggaactatgtgtgaattttcattgtctttgagagccctcttctctgccccatagggagcagctttgtgtgcaattagaggagcaagggttgtgtgtatttagcacagcaggttggcctggtcctctcctctcaacatagtcaccacatacctggcactytgctaaggctgggaatgcagacagatgggtgcctgctttcagagtgctcaatgtgctgaggaagccagcaacagaaacagatgatttcaggagctccaggaaaatgctacaggaggagtgtgcctgggttactggagtagcacaggaggagggcttctagctcaggctgagattttagtaaaggaaattatgccacgatgaatcctgaagaatgaatagaagtgaaccagataaagcacgataggaagcatcttcccttacctaagggaagacacagaggtatatggaatggtatgttaaaaggttgggactccaaacagttctgttaaagcttagagagtggtgggagagactggagaagttgattaattagtaaatgaagttgtctgtggatttcccagatcccagtggcattggayatccrtatyatttttaaawttacagtgttctatcttatttcccactcagtgtcagctgctgctggaagtggcctggcctctatttatcttcctgatcctgatctctgttcggctgagctacccaccctatgaacaacatgaatgtaagtaactgtggatgttgcctgagactcaccartggcagggaaaatccaggcarttaacgtgggctaaattggacttttccaaagatgctgtctttgggaaacatcacacatgctttggatcagaaaacctaggcttctaatttgttgrtaaggcatgaactcaggagrctgttttcagtcctagtgaatggtgataattgtaattrtaacagtagacaacatctcttttacacattttaaatcatgaaaatagaataaccktactgataattttagaaagtggtgattaaaagcacatttaagataatgccttaacacctagtcttttccatatgcatgatgtcttaatcacacattgcaaatcatggaacacagaattttaagcagcatttgtgtagaacttctcagttttactaatattattttattttattctcataacaaccttgaatagaactcagatcatctgtcaatcatgtattttgataacagcctttacagtgagcatagaaaatacagtagtggctaacaacacargctccagatgtcaggttatctgrgtatgaattctggtgtcagcattcactaagcatatgaccttggacaagtgatttaagtttcttttaaacagagaatagtaatacctacctcatattattattgtcagtgtatcatcttacaatcacagtctttctcttagggcygggctcagtgggtggattgacactgcagaaatggccagatctaaaggatcaacatttacgtagctgggaaatgtagctgggacttcagtttcactgcsctrgtgatttttcctaccactaagcagctcagtccatacccctacgagacccacaagcttatgagatactgttcttccaggaaagcagtggggccagggccaccttttaattgtgtttcttggcctggtcccatctttctcacaatayatagcaacagttatttacttgctgattttctaatgcacatcacacatagtcatattaaacacacacacacacacmcacacacacmcmcacccctcaagaaacattttctgagrcgtgatttcctgatttcatcaaaaaagaaaagagcgggccaggcacagtgggaagtcaaggtgggtggatcacttgaggtcaggagtttgaaaccagcctggccaacacggtggaacctcgtctctactaaaaatacaaaaattagccaggcgtggtggcgcacacctgtaatcccagctactggggaggctgaggcaggagaattgcttcaacctgcgaggctgaggttgcagtgagccgagattgcgccattgcactccagcctgggcaacagagtgagactctgtctcaaaaaaaaaaaaaaaaaaaaaagcataaactgaaatttatatgcaatttatatgcctgtgagataattctgttttctcttttggaaccccaaagagatttttttgattgatgagcaaatacattttagattttatttaagcattatgccaagcaccactgaagtataagtttcaagggcaaactcagttttttcatctactagacgaatgattttctggaatgattacaagcaggcaagatggtgtagtggaaatagcaaatgtcttyggcatcagacaagttggggtttgtttgtatcctgcctctgcccttcaccgaggttgtgatcttgggcagattgttgagttttaacctagattcctctgactccagatcataaattttcagaaaagttctgaaattcttgtatatacwgatgrtaaatgagacttttccttacatctatgcacttctttgtttgtttgttttgagatggtcttgctctgttgcccagactggagtgcagtagtgcaatctccgctcactacaatgtctgcctcccaggttccagtgagcctcctgcctcagcctcccaaatagctgagactacaggcatgtgccaccacrtccggctaatttttgtatttttagtagagacagggtttygccatgttgaccacactggtctcgaactcctggcctcaggtgattcgcccgcctcagcctcccaaagtgctgggattacaggcatgagccaccatgcccggccatatccatgcacttcttgcaaccttaccttcttttctcatcaccctccagggacctagttggaagagcagagttaaaagttaaggtgaaacttggagaggtgtcttgtccctaggaacaaaggactggtttgaaattctctgtaaatcttccccagttcaaaccagagttatcaaggtcttaaaaacttccctgggtcctgagagcccattatattatttacttgtcttcctgtacacccactgcctagtcctgatcctacttttgtttgcaaataggatggggcacaacgtacaaggaagggcctttgccrcccctgctaagggataacctgaaataccttcaccatcactgccctgtgctgcttttcacctatgccagtctgtctacagtgccagtgtctyctggcattgaaaggggagaatcttttggtcctttgagtatttggttgggttacataaatctccctgaatgaagagcagctgacttaggcaaggggccttgtttggttttccttgaactattaacaggaagatagggagattaactgtgtaaatgttcaataggccagagtccctgcagagggtggccacagtgatcagatcttatcacatccttgctttggrtgttgcctctctggttggagtatggatagaaaagaaagaaagaccctatattgaaaygcaaagtgcagcaagtcctgactttggattaacttctcagcccatttgcatgaaaataaaaagatgaataaaacarggttcccactttggagggaggtggtagctgtgagatggaaggagtgttcctgctgggcaayagcagagtaagtgctggggtagattcaytcccacagtgcctggaaaatcctcataggctcatttgttgagtctttgtcctacaccaggcactctgcaaaaacgctttgcctgcaaggtctcatgcgatgctcaccacagctctgtgaagttaattgtacttttatcaccattttacagatgagaaaactgagggtatggggtcaatgacttggctaaagtcactgcttagcaagctgcagggactggatgtgaattccaattggtttgactccaaagcctgtgaagctacttgttcttcaccacctagagctgtggttcttgataactgtgaactcttttggggtcacaaatagccctgagaatatgatagaagcaggagctctggcctttctgtccatacctgaacaggtccttgggttaagagcccctcgtccagggcctattaatcttgatcctcataagcagcatccatgtatwamggccgcaaaccaaactgtgccagaccgaatcctaggaccaagcccaaatatgtcccatcatccttttggtaagaagctcattgtaagaaagaaagaggagagcaagaggatgacctagtgcatggggcctcattgttttaattagtgacaaaacaacaataataacaacaaaacccccgaagcttcacagatgacatcagaccccaagcctgtgtgtttttcaggtgcccttgaggagctttgtagctggcagaggaggtgaaactgacaaatgtttggcagatggaggagagtaccagaggggtttgagatgagctaaattycaatctaaccgcaggtgtgaggaagaggcttggattgggaccatggagatgggggttctactcccagtcacgccagctgactttgcgagtgttctttgtcagtcactttatcttattttatttatttttatttttttgaaatggagtttcgctcttgtcgcccaggctggagtgaaatggcgcgatcttggctcactgcaacctccccctcctgagttcaagcgattctcctgcctcagcctccagagtacctgggattacaggcgcctgccaccaagcccatcgaatttttgtatgcttagtagagacagggtttcgccatgttggccagggtggtcttgaactcctgacctcaggtgatccgcccaccttggcctcccaaagtgctgggattacaggcgcgagccactgtgcccagcccacttcatcttaccrtagttacctccttagagtatgaaaaaataggcttagggcatccccaagtcccctctatgtctgagagctgaggctggctgtcaaagaggaactaaggaygccagggactttctgcttaggacccctctcatcacttctccaaygctggtatcatgaaccccattctacagatgatgtccactagattaagaatggcatgtraggccaagtttccacctgagagtcagttttattcagaagagacaggtctctgggatgtggggaatgggacggacagacttggcatgaagcattgtataaatggagcctcaaaatcgcttcagggaattaatgtttctccctgtgtttttctactcctcgatttsaacaggccattttccaaataaagccatgccctctgcaggaacacttccttgggttcaggggattatctgtaatgccaacaacccctgtttccgttacccgactcctggggaggctcccggagttgttggaaactttaacaaatccatgtaagtatcagatcaggttttctttccaaacttgtcagttaatccttttccttcctttcttgtcctctggagaattttgaatggctggatttaagtgaagttgtttttgtaaatgcttgtgtgatagagtctgcagaatgagggaagggagaattttggagaatttggggtatttggggtatccatcacctcgagtatttatcatttctgtatgttgtgaacatttcaagtcctgtctgctagctattttggaatatactatatgttgttaatgatatcatgcagcagacgtgcatctgaatgggctggctctaggagctagagggtaggggctggcacaaagatgcatgctggaagggtccttgcccataagaagctgacagccaaggctaggggagttctgtcttctctgcatcagntcacctctctcacctctgtcactgccccntcagactacaatgtctgcaggtctttctcccctgaktgtgagctccctgagcaaagcaggatgctgccccttccctttgtattcctggctcctggcttcagtgcctggacataagtatgggcataataagtgtcccccaaatgagacattgaggattcttcaaatgcacaggaccgtgatgtgagttaggacggagtaaggacgatgggatgtggctcaggacaatcctgaggaagctgcagctgcggcangcagggccacactgtcatgttcatggaccctagactggctttgtagcctccatgggccccttccatacacaaatattaaaaattatatttcatgactgcattsgtataaagatgaatataatccagaccagattcatgattattcatacatttttagtgtattaacttttaattctgcttttaaaataaattaaaacattctaatatgcccttaagagtatcccaggcccaggccactgagcctactgtggttcatggataagttggccctgggggcatgtgtgtgcatgcatgtgtgtgcacatgcatgatgagccgggccttgaagggtggtragatttgggtgtgtagaccaatggagaaaggcatttggggcagtgatgatgggtgggggagggaacatggtgatgaatggagctgggtgtggggagccatgggagtgggttagggccagcctgtggaggacctgggagccaggctgagttctatgcacttggcagtcacttctgtaaagcagcagaggcagttggcmtagctaaagcctttcgccttttcttgcaccctttacagtgtggctcgcctgttctcagatgctcggaggcttcttttatacagccagaaagacaccagcatgaaggacatgcgcaaagttctgagaacattacagcagatcaagaaatccagctcaagtaagtaaaaaccttctctgcatccgtttataattggaaattgacctgcaccagggaaagagagtagcccaggtgkctggggcttgttcccattagatcttccccaaggrgtttttctccttggtggctggcctgtggggcccctctccaggaggcattggtgaagaaactaggggagctggttgccacagacagtgatgtactaatcttctctgggaagacagaagaaaagtccccagrgaagaatactacagacttggccttagggacagctaggggtgcagattgctgccaactgcattttttctgaagttggccatatggttgcagtgaatggatttatagacagagtatttctgtgcatataagagcaattacagttgtaagttgatatggataagtgaaagttaagcacttctttctaaaaagagaatgcaattcattttcccctaatcatttcaattagtctgatgggcatttgaacttgttrtctttaaaaagtgaaatctttacctctgatctggtaagtatccaggcaatttcttgtgtgccacccaggaggtatctggggagtgggcatttkctgactgaggcattggctgccatagcatcagagcagccttccaggcagtggcctggcaaggggacagaggctggtgggagcagctggctgagtgcagccagtaatggcatgtgcatggtctgtagagaatgtagaagcaataatgaagccgataaaagctggtctgcattttattattatcatgcgccggtggttctaaacaatgtcagtgataaattactcctccccatcatggaccaatggctgccactgctccagggaagtgctttttattccgtttggtgtttagggagggatggagttggctggcctttgctgaaaggcctaccagtttgttttctatttggcaaaagaagaaatgataaagttctagagtttaaaccagactcagatttgagttttttttttttttttttttttttttttttttttttttttttttttwaaggctacaraactgtgctttccttgggcagtaaaagaggcaatgggcaatgkgggacctgatgacaaagggaagcaaagctgtcttaggggtggcatggaggaggtgctgcttcacagcagagagaggtatggctgtgcttggagtgtccacttagacaactcctggctgtgcagccaggccatcgagatgctgtttccttgacctgcaggtcctggtcttgcacatggatgtttcttctggtgcaggagacagaaaggtagcaacaacccctgatcaaagcctcagtccttccttatttactggagagcccctgctgattgaccagaggcacagctggggatatttcctttacctctgtagcaagagacagcgtggtgcagaggaaagtgctagcatacattaccctgtggctgcatgactttgtgaataggttagttagcaccctttcagccacttcttcttacctgttaatgagawaaaacatgtaattgcttaaraacagtatttggcacataggaagcacttagtgaatatgaattatgattttttttggagtggtgacatctcaaccaagccatttaacccctcagccttactttcctcaactataaaatagcagctaacttgaaatgtaaactataaaacctaatgtagtatctggcacatagtagattcccaataaatgagagccagtattctttctaagacagtgatgcatttctgagcacctggccttgttcttctgccttgcaatttatgcagcagttgaaatagactggctgatgggggtaagttgtcaagcagactttctgatcttagtggaggagactgccttaaaacaacactaatttcctttttcttttcttttcttttcttttaagacagagcctcgctctgtcaccaggctggagtgcagtggcgcagtcttggctcactgcagcctctgcctcctgggttcaagcgattctcctgcctcagcctcctgagtagctgggactataggcatgstccaccatgcccaactaatttttgtatttttagtagagatgagatttcaccatgttggccaggatggtctcgatctcctaacctcgtgatctgcccgcctaggccttccaaagtgctgggattacaggcatgagccaccatgcctggccttctttgagaagctggagacatgagttaaktggtgaagaagccaaatctgtatctaaaaaccctacagtwgtgtgcagagctctgaggagagaaggtcccttagattttgagtgtattattatgtcagtgcttgttttacatctctctgttcacgcagtatgtccccttttctgccttgcagctgtttcttaaattctttctttctttgcttgtcttgcagcacaaaacaggcttcagtatagggggaaatgcacagaaacactgccttttcctacaggaaatcagtaactttttactgattttgtttttatttacttattttatttgtttaaatttatttttagttttttttttttttagagacagggtctctttctgttacccargctagagtgcagtggtgcccttagagctcactgagctcactgcagcctcgaattcctgggctcaagtgatcctcctgccttagcctcccgaagggctgggatgacaggcatgagccactgcacctggccaactttttgytgattgcgaatagcactcttgtcaatttcggagagaagctgagactggcatatgtcagtatggatccccacttagagacctgtgtttatctgcactgacaccccatcacagcatgatgagcttggccctcctgtgctgtctctcccagggctgggaggatccttgaagctgatctggtttggagctttgtcctcattcacctcctttaccacacacccaccttcccagggcggggatctaccactcactaagtagcccattctgggtgttgacagctctaattgttagaaaatattcaccaccctgttatgctttctagagaacaagtctaattctrttttccttgaaatagtcgaagacagctctcatgtttttctttccctgttttcccaaagtccatgattttttaggcaaaatggcctcctttcctcttatggaatgtttttcctccccatttctgcctctcctctggttgtgtttcagtatgtctgtgtgcttcttgaagtttactggaaattatgaaagtattctggcacagaggaggaagggatttttgcctcccttgttctgagtgctacatttccgttaatgcagtctgagattgtattaggcattttggcattcacgtcaccttgttgactcatattccatgtgcactcaaacaaaattgtgattattttaaataggcagaattgcaagttacgtgttctccatttctttgttgtattgttggctttttgaactaaagggaaaaatgtcttttttctgttttacatgtttagattccctatgctatcctatcctcccaaaaccattttagattctgattttgccatgtattatatctgatactcctttctcgtcatctagagatgtgataaacaactctctttggcctcattccagtcatcgataactgtgggacaaagacttgaagcttggatcagtccagtggagactaaccacccctgtagacccttttttcctcaactataaaatagcagctaacttgaaatgtaaactataaaacctaatgtagtatctggcacatagtagattcccaataaatgagagccagtattcttctaagacagtgatgcatttctgagcacctggccttgttcttctgccttgcaatttatgcagcagttgaaatagactggctgatgggggtaagttgtcaagcagactttctgatcttagtggaggagactgccttaaaacaccactaatttcctttttcttttcttttctttcttttttttttttaagacagagcctcgctctgtcaccaggctggagtgcagtggcgcaatcttggctcactgcagcctctgcctcctgggttcaagtgattcttgattctgtagacactaccactcaggcctatattgtaatcagtgctgggccactgggctcctgcttctgtgatccagttgggaagtttatcttgttcttcccttcagcttgcatctgctaaattcgctggactatacacaggtgatttgtagatatggggatctctactcaaatactctcatgatttccttggctagagcatcattttatttccacttattggaagagaccttagagaccagttagttcatttatagataaattagttgattctgtcattcaacccttatatattgagcgtctcctatatgcgaatcactgttctaagtgccgagacacagaggtgtccaaaacaaatatggcccctctccatatggaatttctattctagagaagaatctgacccagaagggggaagtgactgtcccaagtctacacaaccacagaagggatattctgggaataaatcacggctaaahccccctgctgctccaggcagttctccttctacagtgctctattgtgctgttttaataatctttcaactgggaagaactcccatttcaggaattaagcygtggacaaatcttttaattatccttgaaatcatcctaataagaaatccaaggaggaagtcttacagggtgcctcacccacttttctcatcactggaactttttagacattttattattttcttcctaaaccagagtacaggcacacaagttgagtggtgtggtggctaaattaattaatgtttgcaaggcagtgtgagaagcattcattcatcttaaatacctatggtgactgcaactcagatgtaaaaattggataaatcctcagaaaccctagggaaagtgacatgtctgtattttgtctctgtgagatacagactggcagagataagtgtttctctgggtgagttttgtgtggtatctgggatgattttaggcagtacgtggatgagaacttttaattttaacccacatccaattgcaatttcatggaaattattgcttaggaggatgttcaacaggaaaaatataattaaagttaattcaaaagaaacattttctgtgaatatggtaaaacttgtgagagtagtttgtaaatgattgaagattggaaaacattggtataagagtgagtgtggggttttgtattaagattcattttgggaagaaatccatgctgcatccctcatgaagtgtgaactttgggcatgtgttgattctttctggcccagagtttacctgaagattagctgccctgagggtcactgagcattaaattagatgatgtctgtggatgactgatagtgaagctcatagcccacagttgacacataataaattcgagttgctttgcttccccttctgttcctggctgactgtttggcctttgccacttgttcggcctctctgggccttaagtttctttgccttgaaattggaactttctttggtgaaacaaccagaaaatgcttcagcccagaaacttggtcagtacttggatgggggatcacctgggactacccaaggatgtgggctgtctgctagactatagccccttgagggcaaggtgggcgccttgctcatggttccatcmtaagccccagcacagtagtgggtgcatggtgagccattagtgaatctttgtggaatgaaggtgggagaaaataaaatacctgtacttcacagggtattgtgagggtcaagtaaaagtgctttaaaaaattgtattatatagtttattcccttgtgttagcccaggtcaacagagcctacgaataataatgatgacagaagttcttcaaaaagtcttggccttctttctttcacaaaattgccccccagagctttctggaagggcagccatgaacccagaggcctaaagtagatttactgggaagctaaaaatatttactttatttttcatagctcctttcaaggtcctctctgggggtcttagcaatatgtttacacagtggtatgtttttgtaaggtttgcaaaagtaagattttttaaaaatactatcttgttttaaaaagagagccccctaccaacttgtgtcagcctcaggcccccacctgcatctgctcctgccagggcatggtggggcaagaagcactgctccccttccaaagcttccttccttgccctggagtcatcctcactccccactccaagccacctgccatcgctgtgccccctctctggtgaatctggcattcttaggtgggctgagaagcagactggcccaagctaaggcctttctgatggggttgttgctgctgagaatcatgactgggtgggagaaggaggtgaccctttgctgtcttatttttactgtgtatttccttttcagctacttaaaatgtattgcttagtgatacctaatgggttcattagcctgcttcctactgaacatttccgctcaggcatccacttggtcccaaggcctgctcctctcccatattctgaaatctggactacagactctcattcaactccaggttgcactgtggacacagtcccctcttgagcaggtacctccttgcagtggttgggacgtcctacttggctcatagttgggaagtgcatatgctggagctgaagcctcttgccttcccgggatagggcgtcctcacatcccctctgagaagttccccagcttccctctgttccccgtttccacacttagcgaggctcttgtccactgctacatcccccatagccagtccctcagccttgccaytgcttatgctggtctggaaacaattcctagacttgtggggcatctggggaagttctccatctttttttagctggcatgacccaagtggtgtgggcagggctgtggattctatggtgtggctggaagccaggtagcctctctctactgtacatggaactcagcaacttctgagtcaagcaagatcttagctctgcaggtgtcttgccctgtccaaagttatggccacaccagtaccttttaactctagaagcccagtaagtgttttgtgggaccgcaaagatcattttctagacctgctgaatatgcctagaacgggtagggatggctttcacgctgttcctagggctgacaagtcacacgtttctgggggtacatacacaccgcggtccctgtgaatggcactctccatgagaactgtgatgatttgagttgaatagtgcacagcctacatggttctctgccatggcctggagttccttatcttgccttctccagtgaggactagggctgcaactggcctactttggctcctgacttgggggattctgaaataccttttttttttaaggttgtggagctctctgaagcttataaggattttgccaggaaaagataagaaatatctttgggcattttgtcactgtgctggagatgaaccctttggaggacatatcaccttgttgaggtcaaggggcggaaagggacaggactggcagagagatccggggcagcagcctgccatcccgactgagtatggagtttctctctcccttcagctgcacttttgtgtggagtcagtggctcagctgccacttcccttatgttcatggcatgaatctggcttgttaggcctttcttttttttttttttttttgagatggagtctcactctgttgcccaggatggagtgcatggagtgtagtggtgtgatctcggctcactgcgaccaccgcctcctggattcaagcgattctcctgcctcagcctcctgagaagctgggattacaggcgcatgccacaacaccctgctaattttttaatttttatttatttattttttttcaaggcagaagaatttttcttagtacagaacaaaatggaatctcctatgtctacttctttctacacagacacagcaacaatctgatttctctatcttttccccacatttcccccttttctattcgacaaaactgccattgtcatcatggcccattctcaatgagctgctgggtacacctcccagatggggcggcggccgggtagaggggctcctcacttcccagaaggggcggccgggcagaggcgccccccacctcccggacggggcggctggccgggcgggggctgccccccacctccctcccggacggggtggctggccgggcgggggctggcccccacctccctcccggacggggyggctggccgggcgggggctgscccccacctccctcccggacggggcggctggctgccctgctaatttttgtattttcagtagagatggggttttaccatgttggtcaggctggtctcgaactcctgacctgttgatccacctgcctcagcctcccaaagtgttgagattacaggcatgagccactgcgcccggctctgtttttttgtttgtttgtttgtttttgtttttgttttgagacggagtcttactctgttgcccaggctggagtgagtggagcggcacgatcttggttcactgcaacctctgcctcccgggttcaaacaattcttcctgcctcagcctcccgaatagctgggattacaggcacttaccaccaggcctggctaatttttgtattttttagtagagacggggttttgccatgttggccatttgaactcctgaccatctttgaactcctgaccatgtttgccatgttgaactcttgacttcaggtgcgttggcctcccaaagtgctgggattacaggtgtgagccaccatgcccagcctgtttggcctttctgatatggctctgactaatctttttggaaattagtccccagggttatactggattttacttagggaaaagggtcatgcctctctggctgtcagatttactgatagtactaaggactcagtggggtggacctttgattctggtttgatttttgaaaatcaaaaagacgtgagctccagggagcagggtggctttggtgacatggcaagatagttggctgtggcagggagttgagggaagtgggtagaaaattaacatcttgtaaatattccctgggaaatataccttcgtgttaagagaacagacttggcagccagatggcctaggttcaaatcttggcttgatgcttatcagctgtgtaaccttggataattccatacatctctgtgcctcagtttcctcaaatggaataacaatagtacctccctcaggactattgtggcaaattaatggacgaataaggggaagcacttagtacagtgcctggcccagcataggtaccaggcttgttcttaagctcactgcatttttacaatcatcataaaatgcaggggatacacacatgaaggagccgaagttcagagaggccaagtaacttgcctaagaaagcacagctggcaaggggcagtaataggaccagaattccagtttctcrtgctctgttgttgttatatcctaaagagagcagctctgagtagccagaagcttccctaaagtcacaggacatggggcatgggctggctgggatgagaaaggagacaagagggcttctgaaagaaatgccagattcactccacttcctggcttcaggcaccgatggaatgtttcccaaggcccatctagaaagaacatcctgtgactcacagccacttctcattttctgtctgaaccccctcacccattcaggcagctgctaaagttgaggttacagcctcagactatattttctgtccttgtggaaccccagtgtgtcatcttgttgggagatctggtgatacatgtgtcaacattatgtcatcaaaatggaaattctttgaaatctttaggtgattgcaattcacgttctgtatgtatgcacttgtcaaaagttttgatttgaggccttagaattttatatttggaaacctttccactaccatgagttttcccagacctgtcaaagccaggctgcatctcagaaaccaggtctttgatttccatccagggcaagggcctgggcccagctgggctgtaagcaggtgggggtggggagcaacgctgcactgcaatgttgaaatattacttgaactaaatcaaatcaaagatcagctttactcagacaagaatagaaaacacaattgcattcgattacagaatagtgtgtatccccacaaatatcagactgcctttaaaaagttttgaattgttaacatcaagaacagtgttgcgtgtctcctgcttttccagcataaggtttatttattctgtgggtggcaaagagcaatttgggagtccagtttgtttctcattgaaagctttcccatttctggtcctcttgtcactgttgcattgaggcaccaaaaggcaatctcartgcgacactattcaacagactaagttgcaccggataatgataccattttacatttttcatatattattacattgaaggcttcaaacagcactagcaggggcaaattggtattattatctccatttcattgatgaggaaaccgaggctcgaaagggtaatgtctgttgtccaagattaaagagtaaagttgtacgttgaatcggggtctgactcctaggcttagcattttctccccacactatgctgccatgttgcttattccaacattaggaagcataggtgccatccccagcttttgaggccaatatcaygatgaagcatttttaaaacatctcattaaattgctgatatagtggaaagaaccaaagctttgcagtcaaagctgtttgggttcaaatttaccacttgtttgttctatgaccctgagcaagatattctccagatctgtttcctcatttgaaaaatgggaataataatacgtttctttataggctgttcttaaagattctggaaaataatgctaatagtgtgcctaatgcttggtaaatatgagtcacttttctgtgcccacaaagcactactatgtcccttaataaattttgttaattttaaaagttagaaaaaaattaaactatttatacattgtgtatgttaattcttccctagaccagccttaggaagaatctcatccccaacttgtaaactcatctttttccgttctttttgtgcctggacttctcagggccctgcaggctgattctagtcccatgttgtgtggtgtttgaagtgtctggtcccttttttcagtgagagaccagctcatccttgggaactgaatgcctcaaactctcttttctttttctctcttccccttctgtttgatgtagtctttcctgtttctggactctgtttcttcatacttcctatctcttaccttcttttcactccttttgtcttccagctgtcctctctcatttttctgcctctctggtcttcaggtagagttttcatctcagctatcttcttgctttttctgatgttggttctttgtttcttcttctcattctgttcaggtccaaaattcatttgggtcaatgttatgtcttagtgttatcttccatttccttctgagcttcaaagccaggctgactgtgcccttccacgccctggccaktgtgaccaggacatcctttccctctggggctgcactggctctttgggggaaktgttaccattcagggtcttcaaccctcattctagggacttccagtaacttctcccaccttccctcttctcagtaagacatgggtattgtcttattctgtttstgctgctagaagaaaattctcgagactgagtaatttatacacaatagaaatttacttctcacagttctggaggctgggaaatccaaaatcaaggtgttggcaggtttggtgtctggtgagggctgctctctgcttctaagatggtgccttgttgctgcatccttaggaggggacaaacgccatttcctcaactggcagaagggactgaagcctctccctcaagcccttttataggggtcctcattgtcaggcctctaagcccaagccaagccatcgcatcccctgtgacttgcacatatacgcccagatggcctgaagtaactgaagaatcacaaaagaagtgaaaaggccctgcctcgccttaactgatgacrttccaccattgtgatttgttcctgccccaccttaactgagtgattaaccctgtgaatttccttctcctggctcagaagctcccccactgagcaccttgtgaccccctgcccctgcccaccagagaacaaccccctttgactgtaattttccattaccttcccaaatcctataaaacggccccacccctatctcccttygctgactctcttttcggactcagcccacctgcagccaggtgaaaaaaacagctttattgctcacacaaagcctgtttggtggtctcttcacacagacgcacatgaaactcatggtatctgtgaggggccctaatgctattggtgagggcactgctcacataacttaatcaccccttaaaggccctgcctcttaatactgtcacattggtgatgaagtttcaatgtatgaactttgaggggggacacgttcaaatcatagcaggtgtgctattgccttactagcaaagtaatctgggggaagatgagtaatgtctcgttccacccctgattccagtgctgactgattctggagtggcagagagggttggaggctcaccgctctgctcacccsaccctctggccatctyctcttagaatgcaagggcagggattttgttacacagcgcctcttttgttataggctagctcctgccttcaaggagcactgagaaaaatattatccctttgaaccacaacactagtattttgggtactgtagccattcagaagtttgttgaactaatacaagtttatattatttgtaaaatactagaaggaatgtgtggttcctaaagttatggtattcccattggttgaaagagaagactctggcttcctaatgccttggaaggttcagggagcataagcctaaatatcctggtttctcttgggaattcttcacagcttgtcatctatgactttatccacatttattttgaacatgtttaattttcagcttgtattttctcaaggagtatgtgtgagtcagcattcagagtacttaacacacttagtgtcattagtgataacttaacccacacgtataggaagctagacctccatttacagaaaaatggaggctcagagagcctaactgactttcccaaggccacataactggaaaattctggaactgagttttttcaggtatgtcttggtatccctcggtgagccttctctgtagagaaggaagtgtctcctgggttggaaagcccaggccgggatgaacagcatgggtgtccttaggctgtgtgtaccacacacccctggcctactctcccctgctctaaggagtcacctgaaggagcagctgcatcaccccgcctcaccccttctcctcagcacccaacaaccaggtcttcccagagagtgctcagctattggtgaagcaggcatcgtctattcttcaagaagacagcagagcatcaggaaaacaaaacaccaaaaaaataccataaagacactggagtgtatttgttaccagcccttgtataacagagaagtatttcaaggtcttatttgtaaggctggacaagctcaggctgattaaaaccacgagttagaatttgtctcccgctcccaggccctgctcagttgacagctcctagcaggctgggaggccccaccccacccccaccccaggggtccattgaagaagaccatctgggcctgggatgctgatgtgattttccctacttctccttttttttcatttgcctcctccacccacttctaaagcagctgattgctctggttccttttcatgttgagcaaaagagaagacagatcttgaaacctgagctggggactggagggcactgaccgagagtaaccccgtctggctcagctcagctcagcaaagggctttcctcctccgccttcctgagctgctctccctcctctcctttcctccttctttcccagcctcccccaagctccttcacccctctcttccctctcctccctcctcccaccttccttgtcctctatgctcagagaactgaaggaacactgaatggcctggaaagcaggacctcgcccccaccccgcgtcatacccctccgcctgcacgtgcaaatgtgttcctcagcttggtcccagaggcctggacctgggtcccagaggtcccagctggttccccggcttggtcccagaggcctggatgtgtggcaagaagctgagggttctgcttcgtttcttccagcccacaaacacacatgtcacctgttttttgttctttttcctttcctttgccccactttacagaagctcttggctaattggtaggtcactgtttgctcctccaggcaaaaccaaggaggctgagctcagcaggtcaagtattttggtctgtattgaagagactgtggtgggagagccctcttgaccttctgctggatagtgactttctcttctgctggcagcagtagcccagctccgcatcctgtgacagaggtcataccttccagttacccgagcgaacacttggagcaagtcagctttttcccctgaaacagcacgttcacgttcttgatctttggtttgcacaacaacctgtgaatgttattagccccgttttttttgtttgtttgttttttgagacagagtgtcgctcttgttgcccaggctggattgcaatggcgtgatctcggctcactgcaacctctgcctccaagcaattctcctgcctcagcttcctgagtagctgggattacaggcatgcgccaccacacccggctaattttgtatttttagtagagacggggtttcttcatgttggtcaggctggtctcgaactyccgacctcagttgatccacccgtcttggcctcccaaagtgctgtattagccccattttatatccaaggaaactgaggcttagggagatttaaataggggggaaagtatagcttcatgattacacagtcaggaaatggcagagctgactcttgaattcagaccctgtgatgctgtatccagtgctgattttgttttgccctgtgttcctttcagtgtcaggtaagaagacctcagagatcatcttctccaacccacacattttactgattataaaatccaggtccgcattaactcattggccaaagttaagtggctaaatgactctcctgttcaggaagtattccctgtcttgtgtggaatgattggtctttcgtccaggtcatcttccacctatatccatccttgcagtgactggtggatatgatcattcctggtgattccctgtaaaatactagatttatttattctttcataaagttatgagtagacaaatcagtcagcttcaacctttcctttaccttatagatagtatcagcagaaagaactcaataattctgtcttaggaactcagccaggctaatatgtattataatacacacatacatatgcacacacatacacacatgtgcataccttagatcacaaattcaacatctcaacttagccgccaaagccacttctgtgtcttgtctattctgaatatgctttaaggttaaattagccatgaatctgttcagatcagtcattcctgaaaatgatgatgatattagccatcctttaccgggcaccttactcagtgcccggcattatactaggtctgcaggtacatttgctcatttaacacctagctcagtccaatgaggtggatgccattgtcatctccattttatcatttaatcaactcagccttcctctctcctgttccccactctgcttctagctgccactcacctgactctcctcttgatctgggctgacgtggctgagtgggtttagcagaactcttgtgtcctctttacttggtttgtttcaagttcatgtcctgcttcatcttttccctaactcactgcaaggtgaattttcttctctgcaatcggcaattccccaaatcacatcaggtcattaatttattcactcatttgtattcattcattcattagttcatccatccatctattcattcattcatccaatttactgagtgcctcctctgtgccaggcactgctggctttggaattaaaaaccctggccctcaaggaatttctattcttctgggagcaggatatttacatgggtgactgcagcttgatctgtgtggtactagtggraaacataggatgttgggcacaaaagagtcacaaaacgccgggcgcrgtggctcatgcctctaatcctagcactttgggaggccaaggcgagtggatcacctgaggtcaggagttcaagaccagcctggccaacatgatgaaaccccaactctactaaaaatacaaaaaggaataatagctgggcgtgatggcgggtgcctgtaatcccaacaactcgggaggctgaggcaggagaattgcttgaacctggggctttggaggttgcaatgagccaagagcgggccacttcactccagcctgggtgaaagggtgaaactctgtattaaaaaaaaaaaaagtcacaaaaaagggctggccacctaacccagcttgaggatgggaaggccagggcaggcttcctggaggaggtgactcatgggccatgtcatgaggatggggtaagaggagaaggtatgtttcagacatctggctttcttaatattcttggctttccacccattttcctgccagcaacataggggagaagactgagaccagcagatacaaagccactgtactctgtcctcaccccctccttttttctccccttcctactacccagatctgaggttttgagaaatctcttctctaattatctgcttgttcattcatttgttgagaatctactatgtgcatagcattatgaccacaaaatgtcctggtcgttgtcatcatgagaggtcttaccccttcctctccagccacttctagggatttttgactctgtccttttccagaacttggctccagtctggttgctcgccatgaagcacttacagataaacctcatcttgggccagtgcttccatttactgtctccttttggcttgcttatccttccttctgccttcttgaattgatttgcctctttatctcycctttcagccttgaaagttcctcgaaggcagggactgtgtccccatcttttctataaatggcattgttgtacattggtaaagttgagtgaaaaaatctttttgataatcacaaattattaccatatattgagcacctaccatgatgagtatctctgatcttcatatctttgaaatgtggatactattaccttcacttaattggtaagaaaatttgtgctcagggaggtaaagtcactttctcacagtcacacagctatttcacaggagagtgcagtatcaaatttaggtttttctggtcccaaaccctgatgtttcccccacatcattgtttctcagacttggctgcaatcacctgaaaaattttattaaattctttttttttttttttttgagacagagtctcgctctgtcacccaggctggagtgcaatggtgccatctctgctcagtgcaaccactgcctcccacgttcaagtgatcctcctgcttcagcctcccaagtagctgggattacaggcacccaccaccacactcagctaattttgatatgtttagtagagactgggtttcaccaggctgatctcaaactcctgacctcaagtgatctgcccacctcacccagccaggttttattaaattctgatgcctgggtcttaccctagcagttctcattagttgctccatggtgtggcctgggctttgggatttttgtgaagcccccagctgagtctaacgggcagtcatgtttgagaaccagtatactacaccatgttgccttcctgttttcacacaggttggtgctagtgtgtgagtctaagcctacatgggtggatatccacgtgatcaggctgcaagttctttgtagtggaggatctttggccctccctgctgcttcccaacccagcgaacctaccacaccatgcacgtgcacagccaagggttgttgactgtttaatcagtctctgggttcttatgtctcatccgggggattcactgataggaggctggagcttgatcacatccagatgttctcatcttcagagcctgttaacataacagaagtcttataaacatgctgagcacactcactggtctggagagtgttgcaggatgacctaggcccattgcaggggtggcctgggtcgccctcccacacttctgccaccctgcttgggaaggagggagctgttttgaagttccctggtgcaatatgatgtattgctctggctctgctcaggaggaagctatggcccacctagtcagtgagggttagctaatacgtgtattctgtttctgttgaggtttcacagaggccttttttgacccttcattttatagataaggcagtggaggcacaactacatgaaatgactcgacaaataaatggatttagaacccaggtttctgactcccagggtggtgctttttccatggttgtacagtgattaatgtctaccttttcacaccagtcctcaactgaagacaccagcttacaccttccttcctgtttctcccaagaacagaaagtgaccccggatgtcgctttctgttcctgggaaggcagttccagtggttagaagtcctgttcactcctggggtgtggcctggggatggtcctgacatccctgggctcttcctggacctggccagctaaaaggaaatctcctatgatggtactcagatacttttggaaccttgtcagccctaatcccatctcctagtgtttagtattcagctacccttcactgggcagtaattctgtgccaggcctgatctgggcattggtggtactaagaacrcatattccctatcctataggcatagtctggtagagacaacatgcaagtaaaacaatgttccttaaactgtggttccacacctccctcccccaacattaaaagtgtaagggatgcttattcaaatgtagatttgtaggctctgcactctagacccactatttcagaatctctggggactgggcccaagaaactgcattttcgcatgctccctaaatgaagcttaggtgctctgaggtttgacaactgcagtagagagcctaatgctaacagtgtagagtcacatgtgatgggaagcatcaggtaggtagcagtttgcaggagcactgattctgagggacactaactgggcctaagaacagctactggctgtcatgaggaataactaggagctagccatagaggggtagcagtgaatcatttctctagcgatgtaaatcttgctcaatttattctgtctatataactcaatattactgaagtttgcctaaagcagaatacacctggatcatacagcatttatgagagactggctgggctgtcaggccctcctgttactttatctctgcatgtgaccctcttagctccgcggattaactcctgtcctcattaagcctcacactgtagccccattttcagatcaaacctgtttctcttctggtaaatgatttcagtttgcaaagtttgccctctagaggttgcttagtgcctggccatgtgggctcagttcatgtggtcctgatgagctggttttatctttattacaaagaagttaggctgttaggagagtgggttggaaggagaagaggtagacagccaaatgagatgagtcagggaaaactatactgtttcggagtcatagggctcctaccaagcatctggtcagaaacctctcattttggagatcaagaaattgaggttcagaaagatgacatgaggtacgcagggacgccaccagacacagcctccaactctagaaactaaaattctggattcttagtgctgctttttctgttttgttgcactggattgaagccttttctaactgtactcagagggcctattatttagggagattcygtatgaaatcctttagcaatcaaatcatttaatagggctgatggtttaaatatatgttaatgtgttttcctaaagcctggcagacctgggttttggagctttgtatcacatgttttatgtttggaatgaaaatgagaccatgtctgtgaaggcactttgatatgcrtaatgcactctgccagtgtttgtcaaaacatggtccccaggtcagcagcatcagcatcacctgtaagtgattctccagtcgcatcccagggccgctgtatcagaaactctgggggtgggggtgggggtgggggtgggggtgggggtgggggtgggggtgggggccggcccggcccggcccggcccggcccggcccggcccggcccggcccggcccggcccggcccggcccggcagtctgcattttaacaagctctccaggtgattctgatgcatacttaagtttgagaaccattgcttgttttgcattaaacaggagattagtctctgcagcttgtgggaataaagctttaaatctctccaattttagctctgtgaaaaggcagtggggagacaggaatgaacggactagtgccacaaagctcaggtggggtgggtgagatcatttagaagagaaagaccgggcatggtggctcacgcctgtactgtcagcactttgggaggccaaggcaggttggatcacaaggtcaggagtttgagaccagcctgcctatcatggtgaaaccctgtctgtactaaagataaaaaaaaaaaaatttgccagtcatggtgatgcatacctgtaatcccagctactcgggaggctgaggcaggagaatctcttgaacccgggaggcgggggttgcagtgagctgagattccaccattgcactccaacctaggtgacagggtgagactccgtctcaaaataaaaaaaaaaaaagaaaaggaaaggctgtgtgtgtgtgtatgtgtgtgtgtgtgtgtgtgtgtgtgtgtaacagcaccatcacactgtttgagttgaggagcacatgctgagtgtggctcaacatgttaccagaaagcaatattttcatgcctctccygatatggcgatgctcccctatctcattcctgtgtgtgtttagccaggcaactgttgatcatcaatattatgataacgtttctccactgtcccattgtgcccactttttttttttttttgagttacttactaaataaaaataaaacactatttctcaatagacttgaagcttcaagatttcctggtggacaatgaaaccttctctgggttcctrtatcacaacctctctctcccaaagtctactgtggacaagatgctgagggctgatgtcattctccacaaggtaagctgatgcctccagcttcctcagtagggctgatggcaattacgttgtgcagctactggaaagaaatgaataaacccttgtccttgtaatggtggtgaaggggagggaggtagtttgaatacaacttcacttaattttacttccctattsaggcaggaattgccaaaccatccaggagtggaatatgcaacctggcgtcatgggccmgctggttaaaataaaattgatttctggcttatcacttggcatttgtgatgatttcctcctacaagggatacattttaagttgagttaaacttaaaaaatattcacagttctgaggcaataaccrtggttaagggttattgatctggaggagctctgtctaaaaaattgaggacaggagamtttagacaagggtgtatttggagacttttaagaattttataaaataagggctggacgcagtggcactgagttgagaactgttgcttgctttgcattaaataggagatcagtccctgcagcttgtgggaataaggctttaaatctctccaattttagctctgtgagatggcactggggaaacagaaatgaacggactagtgtcacaaagctcaggtgggatggacgagatcacttcaaaggtctrtaatcccacgtctataatcccagcactttgggaggccaaggcgggaaaatcacttgaggtcaggagttcgagaccatcctggccaacatggcaaagcctgtctctactaaaaatatgaaaattagctcagcgtggtggcatgctcctgtagtcccagctactcgtgaggctgagacaggagaatcgtttgaacctgggaggcggaggttgcagtgagccaatatcacgccattgcactccagcctggctgacagagtgagactccatctcaaaaaaaaaaaaaaaaaaagaattttataaaatcaggaaataatattagtgtttatgttgaattttaactttagaatcatagaaaacttcctctggcatcattattagacagctcttgtgcagtgggtagcaccagacccagcttgcatggttattgatttttcagagacactttttgagcttattctctggcagaaaggggaactgcttcctcccctatctcrtgtctgcatactagcttgtctttacaagaagcagaagtagtggaaatgtttattcttgaaaataagctttttgcttcacatgatctagaatttttaaaattagaaaaatgtgcttactgcgtgcccttctgaaactaggaaaatatgccttgtgtttaccaattgtgtggttaggagatgggccaaaggcatcaggcttttgaaagtagttgcatttagcataatttccattgccccctgccaatttcatatctgtcacatctaatcagtttaaaataaggggcatcctaagcatggagatggtccttggatggtccttggagtttctgtattktcagtattctttttyttgagcatacaagacatttattgaaaaattcttgggatcaatacttgtgtaaggaaaggaaagggaacaaagcatgattgggcagaggcagaagatgacatcaacaaaggccctccgttgtcagtattctttttttttttttttttttgagttggagtctcgctctgtcacccaggctggagtgcagtggcgtgatctcagctcactacaacctctgcctcccaggttcaagtgattctctgcttcagcctcctgagtagctgggattacaggcatgcaccaccacacctggctaattgttgtatttttagtagagacggggtttcaccatgttggttggccagactggtcttgaactcctgacctcaggtgatccgtctgcctyggcctcccaaagtgttggaattacagacatgacccactgcacccggcctgttgtcagtattcttaaacatagacactaactgtaggctgacagcctagcagcaaggaccagttaaagaaaygagtagaactgaagtgtgcttgagtatctctggcagtcagcaaaaacttaatgggratcatggtaggccaaatgttctgcagtatttcaaaagctgcatgggttttgagaggcttttggtccatcactcaccttaggttgttctacaagcacatcagcctgccccaatttaaacagggcagttagtaatggtgtaataaagagtctgcattgttcattccttcaacaaatactggctataatgtttcagcactgtggatgcaaagtgagcaggataaacaggctcttctttcaaagcttgtggtccactggaccacgtatgaagtagaatagtttaggyccagaaaggcaattaagtaaaatatgaccaagaagaggctctctagtgggtttggtataaagaaaagataagaatgatttagaattggcctatcaatgagataagaggcctggctttctggcactctgctctagggcaagtaaaatggagaattccaaattctgaaattgttagaacatarttctgtgtcttagttaaatatctacacttacagataaatagcataaatgctttctccccatatttcagcccagtcctacttaaagacaacataaattgcaaaatagtgaggatgttgttcatctaataaaagtggttccaggaattcagactctggattcctgtttgccaaatcatgtgtcccactcttaagaaaacgagttggactctggatttttctttgcaagagggacaagagtgtgggagatactgagttaatgcaacttgcaggttttaagtgtcctgtcattgtgccttgtgctttgatacattctgagkttcagtaaagagacctgatgcattggactgttgcaatggaacctgttttaagatcttcaaagctgtattgatatgaagttctccaaaagacttcaaggacccagcttccaatcttcataatcctcttgtgcttgtctctctttgcatgaaatgcttccaggtatttttgcaaggctaccagttacatttgacaagtctgtgcaatggatcaaaatcagaagagatgattcaacttggtgaccaagaagtttctgagctttgtggcctaccaarggagaaactggctgcagcagagcgagtacttcgttccaacatggacatcctgaagccaatcctggtgagyagacttgctcactggagaaacttcaagcactaatgctttcggaatgtgaggcttttccttggacagcatgactttgttttgtagaaaagtacggctggctgggagtttgtgatataatttagttcagtggtattctaagtgttcttagtgttctttcagacttttgggccatctcccaaagggtgaatgggaagaataagctgggtgtggctgagtttaagccaaaagttttttgtgcttgtttcaatcagagaagacctgctttttcatgtttttactattataatactaagcaagagctcatttgaaaacagagttcttcatatttaaaaaaaaaaagtcttgaaaccattgatgggaagatggatatctatttatgtttaaaaacccatcataaagatgacattgtrggctgtcacagttggaaggccctggaattagatgagaccacactatttagcttayttagtaataacattgcaaagaaaaattccgacraagttttttcagcctaggaatcaatagttcagagaagcactctatgagaatacccattcattcttaaccaaaaaatactggtgagcctgagcagtttggtcatcagagtgttttatatagttccagaacaaatatgtctctaggtgttctgagagctctggtgaaattcctctcsctaccccaaacatcatcatttaatatccaggattctggttttctactcaccagatagattctcttaaaaccagggaaagattcctggaggaaggatgtatctggaaagagatgttccttattayaataaaaygaaattgtaatactcttggattttgtgcagcacgaattctttatagagagttggtcctcccagagaattaagaatactcagtttctggaccctgttcccagatcataccctagaatgtgaccttagaaacacacttcaggattcatacctttgattgaccatcaaaaagtttttgtatcggccwggtgtggtggctcacgcctgtaatcccaccactttcggatgccacggcgggcagatcacgtgaggtcagcagtttgagaccagcctggccaacatggtgaaaccctgtctctacaaaaatacamaaaatagccgggcgtgatggtgggcacctgtaattccagctactcgggaggctgaggcaggaggatcgcttgagcctaggaggtggaggctgcagtgagctgagatctgtctcactctgttgcccaggctggagtgcagwggcgcgatctcgactcactgsaacctccgcctcycaggcttaagtgattctcatgcctcagcctccgagtacctgggactacaggcacctgccaccacgcccagctattttttgtatttttagtagacatagggtttcactatgttgcccagctggtctcgaactcctgagctcaagtgatctgcccacctcgkcctcccaaagtgttgggattaaaggcatgagtcaccgtgcctggtcccatgttataattttaaagtaaggtatatttctctacrgggatctttgcaaccctaagtaactggcctaaaaagttagagaagctgacttgtgcagacatttgcagcctrttggtcttttttgtgctgtgaatcatagagggtgaaaggttattatgaatggtacaaaactttgttacaaaaccattttcttggactgttttgggctgcttcactgcatgacaaatgctcaccctttcagytggaatgattgaaattttggaaaagatgggtgtttttagaagacattgtaatttgttccggtgctgtgcccattcattccatttcacttctgtttactcattaaacacctattgtgtacacaacccggtaaaatccctccactcacacaatgcctgaattatactcatagtagaatgactgtttagccctcatcatctgataattaacagctcaggtttcaacctgacagtatctctctgggaggattagcagcgtgacagagtgcagggaaatgcaccttcagaaccgtcagctacactgtgtcccatcctgctgtgttgtggttgtgccttgtggatgcgttggtttatgaccaggtattgattaaggtggctactaccrggtgctttctgcatatctcgggtttgtggagcactcaggttctgcttctgcccctctgctgttaccaagagacctctcttcaaaatggggctcttgagttagagtagaatgagtgatcaggattgttttgtgtaaagatgatttctgaggaaggctttaggatgaaatgacttccaaacattttgaaatgtgactcttacttattgaattaagcagggccttaattggaatgctgggactgatacttgatttgcattaagcagcctttttctattgctgcttggttgaaatttcaacatttgtgatggtagatggatgtgacatgtgatgacattgcacatgggcagttaactgtgccaagaagtgcagcagtagcagcaaccggagatgcaaagcccaacatgatggggagagaaactcttctttcaatatgtgcttctgtaccaaaagtggaatttcacgagagacatattttgaaacatttctccttttgtgtgtgcgtgagtgtttccctgtttccagccaagggtattgtgagtttctcctgggcctccttcagaatctgggtgctctggaaagcagtgttttggcaacatggggaaagtatggcagtgtgggagggtcagctgggtctgggtttgaatattgcatttgaatattttaccagcattgatgtcggataaattatttagtccctgtaagcctcagttttctcttcttctacatacacataatatatttgactctttgttgtgattattggttacacatatgaagagcctggtgtggggcctggcacacaataggtgctcaataaatagaagttgataatttaattgacatgagtagtagaaattatgtccttgaaaacaattgcgtcaagatagaagttttcagccaggcacagtggctcacatctgttgtaatcccagcatattgtgggggccgaggcggatgaatcacttgaggccaggagttcaagaccagcctggccaacgtggtgaaatcccctctctactaaaaatacacatatttgccaggcaggcgtggtggcgcacacctgtaatcccagctactgaagaggctgaggcacaagaatcgcttgaacccaggaggtggaggttgcagtgagctgagatcactccactgcattccagccagcgtgacagagtgagactctgtctcagaaaaagaaaaaaaagatagaagttttcttctgtagatcagtgttagaactcataccaagcraagtggtcctggtgagtatttcagtgaaaaactgcattcttgctcagatattgtcaagacttttcacccaaagattcttatttatgtctcagtccrtaccttgtgtgaaaattaatactggatgtcagaacgctgttgtgtttttaaagttccctggggttaagagcagtttccattaggtgttctctgctttttacttaaaaatcttactcatgcattgagcaatatttattcagttcttattatgtgtcaggtattttctaggagctggactcaactcaaaagatatccttttgatgagaacaaaggtgggtggatatatgaaatattatctgtgggataaatgcacttagtcatgagggagacttgttatggagtgcgctcattgtatttgtactgttgagttaacaacttctaggaggagctcagggccacctggcaggggcttcttttgtcttgctgctcagcaaggtgtattttgctgtagagtgtgctgggcaggtgaacttttcttaactttctcttgggtccttcctaaagcagcatgtacctttcccagagcgaggagagggccaccttcctgtctcacagaaacctccaatctgttttggactgcaggaaggagccatagtagtggaccagcaaattttggcccgagagattgatttgcttccgattgtactttttttttttattgctactataacaagtcaccaaatacttagcagtttataaccacatacatttattatttcataaggccagaagccaggatacagtagagctcacctaggtctacttcttagaggctcacagggctgatatcaaggtgtttgtggggctgtgtttttttgggggggctctgaagatgaatctgctttggagctcatccaggatatcagatgaattcagtcccgtgcagttgtaggactgaagtccatttccttgctggctgtcagcaggggctggtttttgctcctaaaggttgccatcattccttcttatgcttttcatgtgactcctctcccacaagtgggttgagtatctctcacactttaaacctctgacgcctcctgtcacatctgtctccagtcagagaaagttctttacttttaagggctcaggtgtttagtttgggcccattcacataatccaggataatctccttattttgaggttcataactttaattacatctacacagtgcatttgctatgaaatgtgcatattcacagactccaggaatagggtgtggacatctttgcaggggatattcagtctgctgtagctttcttgattggaaggaatagtttatcatatatttgaagtgttccctcagtgcctttggyttttgttgacccctctgcagctctctgctttttcttgcccatatttggaaagtgactctaaagcataataagcatcacctattagggtttttaatgtacaaaccaaacagaggtgactttgggaggagaacatctctgaactaggtatgagacattcatcgaaaaaaatccatcaagtgtttattgtatgtctgctttataccagcactgttctaggcactgaagttcgacyaccaacaaggcarttgtgatgcacttggagctttcattctgatgggcattgagatccaggctgaaggctgagtctgggaatttgaggaattctttgtaggtcctgggtctacagagtgagagctgtcctcgttccagtttcactgatgacctctcgaccagctccctcacagcagtctttgccaacacagacactgtgggctgtagtgggaggaatgtggggttgaatgagctaggtttgggctctgtccttgactcaccattgcctcagtgatgtgaaaatggtgtctgatccttaaggttggaagtccaggcatgcagatttatctccatctcaataacgtggggaaaaaaaagaagtggtttttgtggaaccagtggttccactgtccacgtgtcttccagtgtgcctagcacattcccaccaagtggatcttggttcatgagggaaagaagggaaagtgagggtgccccgaggctcccagaagacaagtaatgtcacagctgagctgtgtacagatcgaagaagcagatggataaggagtgaacaaagtcatccttgtcttgaggggtctttatttagcttcttcttgactcttagacaaggacccagaatacagatggggcttgttgttaccttcagcctcatggctttttagggctagatacttcagcttgttacatgcagtccttaaagcgtctgtgtgggtttttgcaggagagaacacttgctcgtgttctcctgtctggaacccggacattgttggaaagtatcagattttgtttggctttgtgtgatttgactgcccacctgtttacttgctttctcccagcaagcagccgcaatccccatgggttggtaatgggtggaatgacacactgtgtagatttactcttcagactctatgttcacctcattcttatgggaaaagaagagcactagctggtagatatagcagtgtgttaatatgactgctcaactccatttacacagacattttcaccttagttatactatttcttcattaaatattgttgccagatctaagatacaggtttaattttttcctctgaattatgtggtagtagatgtatttaactatgtttagaaacagcaaaaaatgaagcgtttgaatgcgttaaacacatctaatttgaaagttaatatttaggttgttgatttattttttaaaagattagaatattccttagaaatgtagtcttataatttcgtatttcaataaaaaatattaaaatgtttcccagaggaaatctttactgtcatagaaatcaccagaaagagatagcaattactcctgggtggtgatagtctttgatttgtggtttacttgttttcagtttgaactaaaacatactaatcccagcctgagttggattttgcatatggtcaaagtgaagtagagatttttgtctactttatgaagatatttaaaggacatttgaaatgtttcaatgaacacattgtaacatgcattcccaggaggaaaacaaaattgtgtattgtgttgaaaatactattccaatatatgtatacccacgtctcattttgtcatagaattcctgaaaaatttagatgtagatgagatttttataagttgaaaatattttcagttgcattttaattgcacagatgtgttttctacttctatttggctgtgactcctaatgcattgtaatattatcttccagtgttcatttcgtgtagtgataatggattaacaaatgcattcattcatttagtaaacatttactgagccctaatcagtgccatgctctggcccagggaggtagtcatgtgcaaggtccagccctctctgtttcattcctggttggggaatgggtgggacagaccaggaaaggagcagctgccgtatagagcaggagacgctctgctgggtgtgatacagtccctgatggggcctcctactgcagtctttccagtcaggaargaaacatcctctaagtggggacctaaagaatggatgtcagccaggtaaagaacagggagtagaatgttccaggtagaggacatagtatatgcattggtccagagaggagagggaagagaaggtggcatttaggggaactgtacctgattgagatagttcagcatggagcagatatagctgtggggagtttgatgggagaaggaacgatgagacgtgatgcctgcagaggtgggcaaaggtcggctgaggcaggtctttcttcacgagccatgtgaggatatagggccttatcctcagagtaaagggagccattaaaggctccacaggctgagtgacttgatgaggtgaatacgaaacagagcatttctgtgaatgtgaatggcctttggagcagaactaagttcatgaggatggaaagaatataatgaagccatctcttagacccagaaagaatggggcacaacagcctttatctttctggggccaatgtcacagaatgccatgcttttaggaaacatggtatgttgtgattaacacattttgcagaagtgggtgggagcttttgaataataacagtaagcatttgtgcattcttcctgtaatgacattacagttatgatctgaaaatattgagtcatacatgaattcctgttatcttaactcagaaaatatagtccctcactaaaggttttattttccttctttttcccatttcctttacttcgtataagaaagtcacttgtctcctgggtgcaatggagacctatgtgagttcatagccaagagaatgtttttggttagaaaaataatagtaggaattccaagctgtgaattttttactgaagctctttggaaataggatttggcaagttttgtctgccttcgtcaagtaagcatgagcaggagagcacagttaatagcaggtgcagacacatgattctcagaccgtattttgtgttctagtttcaaggcatgaattctttcctggggttaattttattcaaggaagttatctgtctgttagatctgatatgtgctcaggccaacatagattctttacccttcctttcttcctgctcacctgtccttcctcttttatcttttcattgaattaaaaagaaaattatgaaatagtttcaacatgaaaaaaggtacagagaataacataaagaacactcctggctgggtgtggtggctcacgcctgcaatcccagcactttgggagtctgaggcagccagatcactggaggtcaggagttggagaccagcttggccaacatggtgaaacactgcctctactgaaaatacaagaattagccaggcatggtggcgtgcacttgtaatcccagctacgtgagagactgaggcaggagaattgcttgaacccaggagggggaggttgcagtgagctgagatcacaccactgcactctagcctgggtgacagagtgagactccgtcttcaaacaaacaaacaaacaaaaagaacactcctgtaccatcatccatcattttgccgtgctgactccaggttctatttaagaaataaaacattacaggtacagctgatgccacctctgtttccctagctcattcttcagagataactcttgtcttgcagttggatgttttaatcctctatatcatgtatacttacattctatgtataacaatatttggtactggcctaaatgtgttcacattgtataagtgtgcatattggcctgccacttcatttggaattatgttcttgagatttatcaatgttgatacatgtggaatctggttaatttttgccatagtattctatttttatactaaacttttaaaaatccatgcttctagtctttggcttattttttcaggttatggtatgttttggatgcacagaaaagtaaaattaagtcatgagcaaaatatctggataatccaagctttaaacttgatgtagaatttgaatcatgtgtgttttgttaaccctgtgatgtcaatccatgcctgattgtgtaactccaaccaatattcctttgaaaatggaaatttgtttatattgactacagattgccaatattattagtaaatgctgagcacttaatctcgaataaagaactagtttaaaaatgattctaacaatggcattgactgttctaccttattactcatgggtgggttcagccaatgtttctgttggagaccaaaaccaaaaacagtcaaattaaacaagcagtcaaacccaacatacagactactgataagaaggtcatatcataagatatggcattgaatttgtgtctgctaatgtaaaaatctgatgcccacagcaaacttaataaggacctatgtttacatccatgctcaattacattcctgggttaaacagtcatgctttaggccctgctgtgtgcctggagttttgctgaagtgtggggcttttaagagaaggagaataagcttgctccagagttaagaaatttaaactaaaagtcctaaagatgttggaaaaactattgcccttgaagatgtaaattcattaagttggagaagaccttttatacaaacaacagacccattcactgatttgtacccttcaggagacagatgaccggtaatggtgacaatgggtgaatgttgggtttggggtttttagaaacatctgcacttggtgactactgtatctaattggtgtgacaaacctggcaccccatgtgtttggcaccatcttgggtcctactcagggccaggtgaaccgagtggcctcttcactgcttcagagtctgaagcagattgtagtatgcggaccagacacagaatataccaccaagcacgttggcgcaaagcatactgggaagggaggctttgtgaacatggtgctggttctcaaacctcagtgctcaaaagagtctcctgaggattcctggatcacactcttaaacttctcattcagtaggtgttagctggttgagaatctgcatttttttttttttttctgagaccgagtctcactctgatgcccaggctggagtgtattggcgccatcttggctcactgcaacctctgcctcccaggttcaagcaattttcctgcctcagcctctctagtagctgggattacaagcacatgccaccatgcctggctaatttttgtacttttagtagagagggggtttcgccgtgttggccaggctcgtcttgaactcctgacctcaggtgatccacccactttggcttcccaaagtgttgagattacaggtgtgagccaccatgcccagcctgaatctgcatatttaacaagcaccacaggtgattctgatacagtagctccccaaacctcacagtgttagtgaatcccagtcatttacaattctgccatgattttggtcatattcaagtgcagctggtagcatttttagttaatatattttttaaattaagtcacttcttttggataattaaatttaattacaagggaagctataccactgctgtaaaaacatcacctgctttaaagagaaggtacataatgaatatacattaagataaagatgtatatgtgtgtgtgtgtgcacatataagtatacacatacctaccatagggattgagttttccttcaggtttttcaactgaaatgtcaactttgaggccagttaatatgtgtaagatatatgtgtgtatgtatgtctatacatatagacatatacgtaaaaacatacatggatgcatatagtatatctatacacaacctattatgcatatcatgtatatttcatccacttagtattatcttttattttgccgtttggcaaatgctcagtaaaagaaaagggttagaaggggagaaaggcattttatcccaagccttcaggaatcaggatgaggatgtcttcaccttgtggtggggagtaattatacaattagagacagcacattggagtgtggctgatatgctgtgtgatgatagctctagctctctgcctagcagaggaaggacatttcaatagaagaaaaagtttaagaccttgccgagaaacagagaaaggatgtttgtctttttaagaagttgaaaaccctgtttgcagacaaaagccctccagttttggcagtaaactttcatgcaagggaagaaaaaggcaggggatgacattgttgacaattgtgaggaattaccatgtgccaggcactgtgcgaggggctttgtacatatcctctagttttagtgcttataaaaactctgtgatatgtgcacagcattttaaactttgctgcatagtcgagaaaatggaaggatggggaatttgagtcatttgcccagggttctatagctaccccaggttcccatgactggagaattggggcacagggtggcgggggagagtgagtgacaagaatcctaacaatcttatttccattsagtccttataaaagaagtggattaactaccacgtttttaagtttttcttaaatttaggttatgtggatctggcgtttcttgttttgtcctgggtttgttttgtttttgctatgctgtcttgaacatctgtcatcttgtaggcctaacggtaaacacaaaaacactttacctcctatagctttcaattaagatctctcagtttgtgtttgtaatagttttccaggcaagttctccctaggttcggcttctagtgtgttaacctttagttataaagtgaacccaaagagagaaagtagaaacaaaacacctcacctgtttttgctcatgaattactctctatggaaggaacaatcatgaacacctctgcgtatcacagaggcctatctgagtctgacgtttaagggagaccgcgtaggtccctttgaggactgtgaatgtgggagtcctgggactctggtgaagaacccgttccagaagagatgaatgagctggacaagttctttcatagaacctttaggcaggttttcttagaaatgcacattgaggattatgcttggatattgtgatgatcagaatgatactcaatcccttctgcatttggaattctctttgaaagaaaacatcccaggcagctatttctcagagatagtgagtcccagccacttctagacattttcttgtgtagtctacattataatttcacagcagtctctgatatgacaaatgtcaaaatagcccaaccttctctaaacttcagagatgtctgatatgatattgaataaaacaatgctcatagaaacatcaagaaaggtggattttccctggatacttttttcctgcttgacaaataacagtgaagaaactgatctcacgtctttttctctttggaagcctgaacactcagaacccaacttgaggctcctcagctatagcaattctgacttcacagtctgtaaattattgttcttttttttctttagcttatgctttctgccctaatttatcttttccctgttctaatgaattattgtcctatatctgctgtgcagttaggtgacatataacagcaattaaatatatgaattggtacatataaagatttgactaaaactcgatgtaaaaataagtgttctacattcaatttccagtgttagaaacagtgctgacttgaacagagtgacagaattccatctttccctatttttgacagctttaaactttatattttcttcctttcttgtgagccgtcattaacttgtttctcaaagccattcccgtattacccatcttgcagacgcagacagatttgggaatttgcggtcagagttgtattggacacatccccccagcccacatgagatccttttaatctattgcatattaactagttttaagtacaatattcctacttcatttaaaaccattaatcaaagaatgagtttgaaaatgaacaaaatgcaaacttacagttagaaataattgtagtgtctttagttttggttaggagtcggtttcttgtttgttaaactcaagattgtgaacagttttaattcacttgtttatttccaatagagatttcaggtttacatttgaattcagaaacaaagttttctttctcattacagagaacactaaactctacatctcccttcccgagcaaggagctgrctgaagccacaaaaacattgctgcatagtcttgggactctggcccaggaggtaagttgtgtctttccagtaccaggaagcggatcatccactgtatcagtattttcattcctgagtctggcaagaggtccttttgagttgaatatcacatgggatgtaatatcaattttcaaagtataagtgatgtaaacaataatgttttgatttccttattttagaaatgaagaaacctaaaactcatagatgtctcagagctaattggttagtggctaacagctggatatctagtttagaaccttctccattttttctttttgcccctaggtaatcatacatttgtaaagaggagaattatctctgccactgcccatgcactgcttttgtctgaccagcaatttctccatattgcttcttcagtagcaaggccaatcattttaccaacacacatgcttgctaactaacaggaataacgtggtacccctaattcagccctttcccttgaaagcatctggcttctgaggttcaactatgggaatatggtctcttaatgaacattaagttgagtttgccttttaggtccacatgttgacaaatgtrtcagagtaatctctgtcctaggatcagagggcctgtaggcacttgcaaaagcagttagctctgactcccagccagtgcacactccacctttctgactcccagccttgtctcaaattaggcttggaagcgaggaactgtctggtgtcccccagcataggaagctgagccagggggcagtgctcacaaacaatacagactttaacgtgtaggatattggaaaataataatttgtggggaaattgtctcagacttggtccacccttatttttagctgcttctctaatccgtttttctttttttggtgcttgtatctaacctacccattttttggtgcttgcatcattttttcaaatatcaaaaacgaactttatgttttctaacaatgaaagtattgcatgttcattgtggaaaatgctgaagacttggaaaatacaaaaatgctgagatcaaacactattgatacgttagtgtatttcttcctgtcctgttctacttwctttctttgaattctgctcacgtgtttctgactgatgaggtctgacttttgggttccttttccagaggagaagccttctttcagcttgccatttgttaccctggttatgaaggctggtaaccttttttactaggtagagaagctggaccaactggggttcttccagggggagaatgagaaagagaaactgttttgcaagtccgtagctatttctctagggccctgttagctgacattgacatgccttgcattgctctgcagatcccctcgcagccctctgtcccttgttcatttctggccttagagaaagcaaagcagggtctgtaacaggggaggctgcctctaaactcagggtttggttacagctgttttcacttacatcactggccctggttttttttttttttctggcattaaaaaaaaaaattggaagcaggtgatgttcccattgctgatgtggtggaaactctccaagtgaacaatatacgtttttcttggcagctgtttcttgtgccctgcttgctcctggtccaggacaagcaaggaccatctgcctctttcaatagaacacctccagatccctttgatcaaaagttactcattgtctgacttgctatttctgtgagataaatgggagaagatcaataaatgcacttgtttgtccagtcagcgtgtggaaagttgataattttgaccaaagcacaacccttgaaaggaaaagaaaaagggagtgaatgtcttctgagaagctgcctaggttcagacagtgtcacccatttccctgtatgctccacatgacaaacctgagtgggtctcatcatgtccattttgcagatggcaccaaggctcagaaaggttaggcaacttttccagtcacccaatgagttaattgacaaaactgggattcaaacccagaactgttggattccaaagcctgtgttgttgcctgcttcgtgaaaaactccagtagcgactggaatagaaaggagaaccttccaagaaagaaaatacgcactagcagaacctggaaattgggaggaaatgaggacttgaggaataagatgaatgaaagctgacctgagtttcacatctgggtgatgggaagggaggacagggaggcagcatctcagatgtccacccagcaccgaccagctgcctggcattgctaggtgttgaggactcagcagtgaacacgctaacttctctgctttcttggggcacgtatagggtgagagacagaaacaaacaggtcagtgtacaatgccacaggagggatatatgcagtgaagaaaaagcagggtaaggggcatagagcatgagaaggtgctttttttaaagggggtgattaggaaagctctctctaaggtgacagttggacctgaaggagatgatagcatgtctgtggtgagggaaggaaactccgaacaggaagaatggcagatacaaagacattgatgctagagcatgcctaaggaatgtgtttaaggaccagggaaagtgagcaagtggtggggggaggagaggagctcagagcaggaggaggtgagtgccatacaggcctggcaagactttggattcctgctgggtgagatgagaatccagcggagggcttgagggaggggacatgatgtgatctagagtttagactgtttacactctggttgttgggttgagaagagactgggatgggggaaagggaggacaaaggacattgtgctggattgagaaagcagtaagtcagtttcattcattcactcarccgatgatgttcaaataccaccatcatccgtgggctaaaggatgaagagccatccctccctgagagtcaggaagcacttcccagataaagtttggagtgtgagctgaggtgtaggagaaagagtaagagtttacccctgaaacgggtgctgggaagagtcaatagtttggaataactcaataatttatggtgcttctttagaaagatttgctggctttatgtgggaagaaatttktttttttgattggggagtggtgggttggtggtgaggctgcctgtggaaagagaagtgagtgttttgactcactgttatttaaaaatctctagggctgttccaataagcaacaaaaggcaaaatggcctggttctctgtcmcctttctgtctgtatgcctcgtacaggttatgaaaagaaaaagttgggaaaagctgtccacctcacctaattgtrttcttgtggagtgtgctagatgccccctctctggagaaaaaaaatccttgtggcctctgacccacctctggagagcctagttcccttctggaggcagaaggcaaagcttaggwcctagagartgctggaccacgccactcacaggaaccagcaggctgtgaggttgaaagctaggcatatggagctttccaggctgggtgcagggcctcgtggcccttcccctcccctctgtgctctatagctcagtcttcccaggcggtgtgaacacgcagtgacatttccaggaatacagggatttattaatgatttmttgtgaaatgtttggaaatacaaagtactctataaatatttcataatagcattggggctgagaactccacaaagtgccggaatacatttgcatgtaagacagaacgctgcctgggtcattgatgcctgttgagtggcagtcacagacactgcctrgggtttctgactcacgctgttgggactgttctatgcagggcaccctcttgtgtggcataggatttgtgcctcaccacasactgttgtagctttgctgtcttgatgatgagtagagggcagtgtccaggccatggtataagcatctactgccccccagggttaccaaaaccaagccaagttgtgtctcagcgagctccgtgaagcatggagaagttgagtactcagagacatgacgtgacttttcaaaggctgtaagctgacgagggacatagctagggttcagacttgagtttttctttttctttttctttttcttttttttttaagactgagtcttgcttttgtcgcccaggctggattgcagtggtgcttggctcactgcaacctctgcctcccgggttcaagcaattctcctgcctcagcctccccagtagctgggattacaggcacctgccaccatgcctggccaacatttttgtatttttttagtagagatggggtttcaccatgttggccaggctggtcttgaactcctgacctcaggtgatccacccgcctcgacctcccaaagtactgggattacaggtgtgagccactgcaccsggcccagactcgagtttttcatcttaatgctttttcattgcctgacactttactgagaccaagatagggaacttcacatacagtaccttttctcccaaggcggaagagggctgttcaatttctacactagagttcggggagttttagaaatgagycagttrtcgaggatgagagcagttcctgataggctcaaccacaatgagatgtagctgttcagagaaagcattcttttatctataaactggaagataatcccggtgaaacraagcccagccccaggggcttcactaactccaggctgtgcttctcaaactttagtgagcataggaatcacctgggcatcttgtgaagctgtagatttgaattctgcaggtcggcagaggggtctcagaatccgcatttccaacaatgtctccagtaatgctgatgctgctcgtccctggaccacagattgggtagccaggttctggcaagctcatcccaaggctttgagatgacatcagacaaaatatgttctgggacatggcttttgagaggtcaagaaaataagatgtttctttctcttctcatccccaacccttgcactgcccttttctcccttcccctaccctcctttctgtccccatccctgacgccagctgttcagcatgagaagctggagtgacatgcgacaggaggtgatgtttctgaccaatgtgaacagctccagctcctccacccaaatctaccaggctgtgtctcgtattgtctgcgggcatccygagggagggggrctgaagatcaagtctctcaactggtatgaggacaacaactacaaagccctctttggaggcaatggcactgaggaagatgctgaaaccttctatgacaactctacaagtgagtgtccatgcagaccccagccctgtccccaaccccatccctcccttagttctggccttggcctgtgtcatctcctccctctgtagcagcgttagatgtctacatgcccatttgcccaccagactgagctcttcctagaggagagaggcttctcttgaatagctacctgtccccagttctctgaatgcagcctggcacatctcaggtgcacagtagtgtttatcaatggaatgaatgattgacagccaaccttctggttttctgggggatgtggaagggtggcttccagggtgatcaagaatgagataatggcagaaggacaaatcctgcaagatctcacttatatatggaatatatgtaaggtagaaagtgtcagtttcacatgatgaataagttcctgggatcttgatgtacatcgtgatgactatagttagtaacactgtatagtatacttgaaatttgctaagagagtagatccgaagtgttcacactacacaaaaaaggcaactatgaggtgatggatttattaacagcttgattgtggtgatccttttacaaagtatacatatattaaaacatcacattgtataccttaaatatatacaatttttgtcagttgtaactcaaaaaagctagaaaagcatttttaaaaaggatgatgtactggtcttaatattaccattgagataagctttataataacataaaaagaaataacagtaatgataatagcaacaacaacaacaacaaaraactaacatttaagtagaatttcttgtgcactgtgcattctgtttaagttatctcattttaccctcatgataaccctgcagggaagattctttaaccccacatttcataggctcagagaggttaagtgccttggttagagccacatcagagttaatccacaagagccaggattcaagcccaaatctgcctggatctgtgctctctaagataactgttagtggtggcgtgtgtgttctcacactcagacatttgatctgcyctttgtttcccattcttagctgcaaggcrgtgttaaagaaccctgtgtctccatatccactccccacacttaagcacttttgtgggcccgtgtgccgtatgcctcgtggcagcagggatccaatgtcacagttttaggcagtggcatccttttccttgaaaacttgatgcaggggaacctttctccatttccaaccacaggtgtgtctttcagacactgagtgaggcaggttttgtactttattgtaacacaagaaccttttctyctctggagtaaagcactccagacattcgcaagttgctttacaagccttaaaaggatggtattgtaggcaactttaattaaatcccatctcctcctctcccccagcttgcaagttgacccaaggaagccttcatttccatgacagacttaattgtgagggcatcctcattaaaaaaaaaaaaattctattatctttccagcatatagaagatacttggtatctaaaaatccctgaaaaacttagaatgaatttttaaaaatcagggatcctgctggataaccaaacccatttgtctgttacaacttttgtatttgggtttttgttaagtgtacatatactagtttgtgttaattaaagagaatttttttttttttttttgagagggagtctcgctccgttgcccaggctggagtgcagtggcgccatctcggctcactgcaagctccgcctcccgggttcacgccattctcctgcctcagcctcctgagtagctggaactgcaggtgcccgccaccatgcccagctaatttttttttttttttgtattttgagtagagacggggtttcactgtgttagccaggatggtctcgatctcctgacctcgtgatccgcctgtctcggcctcccaaagtgctgggattacaggcgtgaaccactgcgccctgttgagaatttttttttttttttttgggagacggagtttcgctcttgttgcccgggctagagtgcagtgacacaatctcggctcactgcaacctctgcctcctgggttcaagcgattctcctgcctcagcctcatgcgtcaccacgcccagctaattttgtatttttagtagagacagggtttctccatgttggtcaggctggtctcsaactcccaacctcaggtggttcgcccgccttggcctcccaaagtgctgggattgcaggcatgagccactgcgcccagccccaaattttggtttttgcttgaaaactgaggtctgaattcagccttctggttgcccctcaagagtcagtttaaatgttggtcatgttagttgtcagtgaaaacaatggtgaggctggcatgagagtgtgaayctggatgggagggcttgtgcttcaygaaaacatttttccagatcagctcagtcgtgagttatccgtcattgacgttataataagctctgattatttatcaagcatcattctttatagatatctcagtttaatctgagataatcttctccacatctctccacatagatgttatgaattttacttttacagaggagccaactgaggctcagataagttacttattatatgactagtagtggtagagctggggtttcarctaagaactctctggctccaaagcccttgtaagtttctatcagtatatgaccatgcatatgagcatttgtctctcctcttcttcatagctccttactgcaatgatttgatgaagaatttggagtctagtcctctttcccgcattatctggaaagctctgaagccgctgctcgttgggaagatcctgtatacacctgacactccagccacaaggcaggtcatggctgaggtaagctgcccccagcccaagactccctccccagaatctccccagaactgggggcaaaaaactcaaggtagcttcagaggtgtgcgctaagtatactcacggctcttctggaattcccagagtgaaaacctcaagtctgatgcagaccagagctgggccagctccccagtcgtgggtatagaatcatagttacaagcaggcatttcttggggatggggaggactggcrcagggctgctgtgatggggtatcttttcagggaggagccaaagcgctcattgtctgtgcttctcctcctttttctgcggtccctggctcccyacctgactccaggygaacaagaccttccaggaactggctgtgttccatgatctggaaggcmtgtgggaggaactcagccccaagatctggaccttcatggagaacagccaagaaatggaccttgtccgggtgagtgtccctcccattattaccatgtgcctgcttgatactggagaggtgagtttctggtcactttcccaggtgtgagtgaggtgagaattctttcagtttatctagctgggggaatgtagtgagcatagctaaagtcacagggcaccacctctccagaagtacaggccatggtgcagagataacgctgtgcatatcagcatccatgccactcacggtcaaatagcagttttctgcaaaactyagtgagggctggtgtttggaagtggagttgagtaattgcagtaccctattttcctttttggctgcagcctctcagccagccacagcatctccctgtgtcttggtaggttttggaaagaagtgtgggagcaaamgcatgatgttacatgtagactggcctgagatactcattctcagggcactgtgtgaatgatgagctgctgttactgtgtggaggggaaatgcacttagtgcttcagagccacttgaaagggataagtgctctagagacaattggrttcaaatgtggagcaggctgagcaagaacagaatgtctcctttgcctgagcctgagtgctgttaatcacatcttcctgccttgggctgagttagagaatcattagactatttcctgtttccatggtgagggaggcctcttccttttgtctctgctccccttaagaagcaggtgaggattttgccaggtttcttgttttgaaccttattgactttaagggcggctgggttttagagactgtacctacctagggggaacacttccgaagtttaggactattccctgatccgctgggaggcaggttactgaggaagtccctttaaaaacaaaggagtttatactgagaaaagcataaacagtgatttgtatggattcacactgactaatatagctcatgccattaaagtggggtctcttctctaaaggagggttatatgatctagccccgtagacctaagtgtggtttcagacctgttcttcctggtcctctccttggaatccatatttctactagttggactttttctgtttgtctggctctcagaggattataggaggccctgtgaagtgactcagtgaattttgatttgtgggcaagtagatggttccctagtctgaaattgactttgccttaggtgcttcaattcttcataagctcccagttcttaaaggacaagatccttgtaaacatggcaatggcattcattaggaatctagctgggaaaatccagtgtgtatgcttggaaatgagggatctggggctggagagaaaggcatgggcatgccttggagggacttgtgtgtcaagctgaggacctttactttaagctctaggggaccaggcaaggggagatgtagatacgttactctgatggggtggatgaattgaagaaggatgaggcaagaatgaaggcagagaccagggaggaggctctccaagtggccaaggcataaagcaagaaatgaggcctggtgactgcttagtggcagagcagtgaaagagagggaggcatcaaagygagtctcgatttctagctgggtgggtggtagcgatgtccagtaggccagtggctactgaggtctgcagtggaggagggtggttgggctggagacagatgatgagggagtcatcagcctgtgggtggaagaaaagggaacctcttccaactgttttctttgcttcttccctctctttctctttttttttttttttggacagagtcttgctctgtcaccyaggctgaaatgcagtggcatgatcttggctcaccacagcctccgcctcctgggttcaagcaattctcctgtctcagcctccagagtagctgggattacaggcacatatcactgtgcccggctaatttttgtattttcagtggagatgggatttcaccatgttggtcgggctggaatgaactcctgacctcaagtgatccacctgcctcagcctcccaaagtgttgggattacaggcatgagccaccgcgcccggcctttcttccctctcttaaagagtgtttatttaattccacaaacatgagcttgtcaccccctgtagcctggcatctcctacacgaggtgatggctgaggcttctgcttctgctggggtagctctgatctttctgctttctctggcactgtctacccatgttgcctcaccccacaggtcccagggcacctctctcgggcaagtcttggaaccctctgacactgatttgctctcttttctgagctgcttttagccacccatcctcrggacctgttttctctctgcctccacccctgcgggcagtcttaggtctcctgcccctcacgagcaccccagagaggccacgtgctcagtgatctcagtgggcgcatctttctagtcttgctattctttttggycatgttgttcagaaaccatactgggcagggccgacttcaccctaaaggctgcgtctcttcactctgcttttgtttgttccaaataaagtggcttcagaattgctaaccctrgcctctgtgaacttgtgaggtacaattttgtgtctgttatgttaacaaaaatacatacataccttcctggtgatggtataaattgctattctctattggaaagcaatttggaatgaaaatttaaagaaccattttaaaatrtgctatcctgcgtacctscattccacccacccccagggatgtagcctactgaaataattttaaagaagtcaccatatgagagaaaatgttattgctatattgttattgtgagaaattggaaatagactaaatgttcagcactataggaataattaatgaaattacatatactctatacaatcattatgctgccattgaaataataaatacaaaggcgcaaggggggaaaagcttataatgttagtgaaactaagactgatttttttataaagcagcagttttcagacccttggagactccaattcggtagaaccagrgcttcatcttctctgtcgaagctgtgacaggagttgcaaatgcctctcctttttgctgagtttgcagctgctgtttttcyggcagcacatctgtgcaggcctctgcctcggcccctctggatctgctgattgagcagcggattgatctgtccttctctttcgtgttgacccatgtgaggaaccractggcaagggaacaagaaatggaaataggcctcctttgcatcatgacctgtacatcctgcaattggaaaagattgtactttagttggtttaaccagcagcattatttttctaaactaagcaktaagaaggaattaggttttatgtgggatcaacagactgggtctcaaaagaggaaggtgatagaacacagtggggagggggaggtgcactagaaacagagggcctatgctttcattctggctttgctacttaatagctgtgtgacccaatcttagagacttaacctctctgaacttccattttctcatgtataaaatgggaaatattaaaggatactcactgggctggtggcttgtgcctgtaatcccagcacttggggaggttgaggtgggaggatcacttgagcccaggtgttcaagaccagcccaggcaacatggcaagactctgtctctatgaaaaaattaaaaattagccaggtgtggtggtgtgcacctgkagtcttagctacttggtaggctgagatgggaggatcacttgggcttgggaggtcaaggctgcggtgagctgtgattccatcactgcactccagcccgggcggcagagcgagacactgaatccaaacgacaacaacaacaaaaggcaaaaaaataaaagtgccctctttatggagttgtgtaaggtgaagcatatacactattcaacatagtaactatataaaggaagtattgttgttgttactgtagttaataccattaagtgagatgtttcgtatagtggaaagcacatggactctgaattcagactggtctgactttgagtctcagctccacatctagtaatactatgaccaagccctggttaaaatcatgtttttttttcttcagcctyagtcttctcacatataaaatagggacactgtcatttacctcagttttctgtgaggataaaacaacgacagtgtatatgcaagtattttgtaaattttgtagtgctcctcaagatttagttggtgtttactacttgtactttctcactggaatggcagatgctgttggacagcagggacaatgaccacttttgggaacagcagttggatggcttagattggacagcccaagacatcgtggcgtttttggccaagcacccagaggatgtccagtccagtaatggttctgtgtacacctggagagaagctttcaacgagactaaccaggcaatccggaccatatctcgcttcatggaggtgaatctgttgctgggatcatttagaaaagacttaacggcttctttctctgagacgttacaataaggttcaggcaggaggcaagtttagaaataatgtatagtctcatttacaaaactatccctcaagcctaacacaggatttgataacaaaaggcacttaataaatgttagttgagtggttgaatgagtaaataaactctagctttagtaaattaactctagcttattctatataggctcaagagaatatttctacccattttcttctaggttttcctatctcagtgactaatggtagcaaagcattcccttaaaaaggcattatttgtgaaacttayctaaaatcgaattcgggtccaattaaatttttgaaattttatattaaaaattatattagtagggatgggtaagaggtgttttggtctggttggttggttagttgctatgactcagaattgctaagaaaacagaaaagtaagataagatcaytgttttaacctcttttcctccacaaaatcaataaataacatatccctaaattactcttagaatttctcttaaattgcagtgaaaaaccaaaatccttcattcttggttgaaggttggaaaactacgttagagaggattagagagagaggatgagcaatcgtgtagtcagcccttgcctcctagtgtaggatttgtctcagccactgcttgttgtcctggctgccaacgttctcatgaaggctgttcttctatcagtgtgtcaacctgaacaagctrgaacccatagcaacagaagtctggctcatcaacaagtccatggagctgctggatgagaggaagttctgggctggtattgtgttcactggaattactccaggcagyattgagctgccccatcatgtcaagtacaagatccgaatggacattgacaatgtggagaggacaaataaaatcaaggatgggtaagtggaatcccatcacaccagcctggtcttggggaggtccagagcacctattatattaggacaagaggtactttattttaactaaaaatttggtagaaatttcaacaacaacaaaaaaactcaacttggtgtcatgattttggtgaaattggtacatgacttgctggaaggtttttcataggtcataaaataacagtatcttttgatttagcatttctactcaagggaattaattccaggaattttggtggcaggcacctgtaatcccagctactcgggaggctgaggcaggagaattgcttgaacccaggaggcagaggttgcagtgagctaagatcgcatcattgcactcccgcctgggcaataagagtgaaactccatctcaaaaaaaaaaaaagatrcaaaaatagaaaaaggggcttggtaagggtagtagggttttgggcaatttttttttttttttttttttattgtatggttctaaaggaatggttgattacctgtggtttggttttaggtactgggaccctggtcctcgagctgacccctttgaggacatgcggtacgtctsggggggcttcgcctacttgcrggatgtggtggagcaggcaatcatcagggtgctgacgggcaccgagaagaaaactggtgtctatatgcaacagatgccctatccctgttasgttgatgacatgtaagttacctgcaagccactgtwtttaaccagtttatactgtgccagatgggggtgtatatatgtgtgtgcatgtgcatgcatgtgtgaatgatctggaaataagatgccagatgtaagttgtcaacagttgcagccacatgacagacatagatatatgtgcacacactagtaaacctctttccttctcatccatggktgccacttttatctttttatttttatttttttttttgagatggagtctcgctctgacgcccaggctggagtgcagtggctcgatctcggctcactgcaacctttgcctcccgggttcaagctattctcctgcctcagcctccacagtagctgggactacaggctcatgctgccacgcccggctgactttttgtattttagtagagacgaggtttcaccatgttacccaggctagacttcaactcctgagctcaggcaatccaccctccttggcctcccaaagtgctgggattacaggtgtgagccactgcacccagcccaccactttaattttttacactctacccttttggtcaaaatttgctcaatctgcaagcttaaaatgtgtcatgacaaacacatgcaagcacatactcacacatagatgcagaaacagcgtctaaacttataaaagcacagtttatgtaaatgtgtgcacttcttctccctaggtggtaaaccacatttcaaaacaacccaaataaaactgaacaaagcttcttcctcttagactttttagaaaatctttcagtgctgagtcactaagctgccaagttctcattgtgggaactatgcctttggatgtaatgatttcttctaagacaatgggcggaggtgtagttattgcagacatctgaaatatgtaatgtttcttccagattctggaaattctcttattctctgtggttggtggtggtggtggsatgtgtgtgtgtgtgtgtgtgtgtgtgtgtgtgtgtagggatcaggatgcgggaggagctgggttctgcttktattggttctctgttttgcattgaatagtgtgtttccttgtatggctatctatagcttttcaaggtcaccagaaattatcctgtttttcaccttctaaacaattagctggaatttttcaaaggaagacttttacaaagacccctaagctaaggtttactctagaaaggatgtcttaagacagggcacaggagttcagaggcattaagagctggtgcctgttgtcatgtagtgagtatgtgcctacatggtaaagctttgacgtgaacctcaagttcagggtccaaaatctgtgtgcctttttactttgcacatctgcattttctattctagcttggaatctgaaacattgacaagagctgcctgaaatgtatgtctgtggtgtgattagagttacgataagcaagtcaatagtgagatgaccttggagatgttgaacttttgtgagagaatgagttgtttttttgttttggtttttagtactttaacataatctacctttagtttaagtatcgctcacagttacctagttactgaagcaagcccccaaagaaatttggtttggcaacactttgttagcctcgtttttctctctacattgcattgctcgtgaagcattggatcatacgtacatttcagagtctagagggcctgtccttctgtggcccagatgtggtgctccctctagcatgcaggctcagaggccttggccyatcaccctggctcacgtgtgtctttctttctccccttgtccttccttggggcctccagctttctgcgggtgatgagccggtcaatgcccctcttcatgacgctggcctggatttactcagtggctgtgatcatcaagggcatygtgtatgagaaggaggcrcggctgaaagagaccatgcggatcatgggcctggacaacagcatmctctggtttagctggttcattagtagcctcattcctcttcttgtgagcgctggcctgctagtggtcatcctgaaggtaaggcagcctcactcgctcttccctgccaggaaactccgaaatagctcaacrcgggctaaggraggagaagaagaaaaraaatccaagcctctggtagagaaggggtcatacmtgtcatttcctgcaatttcatccatttatagttggggaaagtgaggcccagagagggrcagtgacttgcccaaggtcaacccagccgggtagcagctaagtaggatgagagtgcagggttcatgctttccagataaccacatgctcaactgtgccatgctgtctcattggtagtggttcatggcagcatctgaaagctatttattttcttagatatattgggtggcgattcttcctaagtttctaagaacaataatcagaaggatatatattgttgcaggttagactgtctggaagcagaggctgaaatagagtttgatgtatgggtatttatgagggctcaatacctatggaagagatatggaagatgcaggattgggcagagggaggagttgaactgtgatatagggccaaccccgtggggcactctagagaatatgcagcttgttggagttgttcttcatcgagctgaaacatccagccctttgtgctcccccaaggcctccctcctgacaccacctacctcagccctctcaatcaatcactgsatgtgggctgccctgggaaggtcgtgccccagggcctacatggctctctgctgctgtgacaaacccagagttgctgatgcctgaggccgtctactgacagctgggcaacaaggcttccctgaatggggactctgggcagtgcagttttgtgtctgaaccatacattaatatatttatatccgaattttctttctctgcaagcatttcatataaagacacatcaggtaaaaataaatgtttttgaagcaaaaggagtacaaagagataagaactaactaatttaatactagttaccatctgttacaaatagttcctactgattgccaaggactgtttaaacacatcacatgggcttcttcttctatcctcactaacccttttaacagacaaggaaatgaggctcaggaaggtcaaggactttattgaggttccacagtaggatacagttcttgctaaaagcaacccctccctcatgctctgttatctaactgcaaggggaaggtcagtggcagaggtagtggtcccatggttggtgcataagagctgctctgagacaactgcatgctggtgggtcctgcagacatgtasccatcagccggagataggctcaaaatatccacaagagtttggatgattgtgggaatgcagaatccatggtgatcaagagggaaagtcaagttgcctggccattttccttggcttttagacagaaaagttacgtgggatattatctcccacagctcttctgtggtgccaccagtcatagtccttatataaggagaaaccagttraaattacctattgaagaaacaaagagcaaactcgcccactgaaatgcgtagaaagccctggactctgttgtattcataactctgccattatttttctgcgtagttttgggtaartcacttatcttctttaggatggtaatgatcagttgcctcatcagaaagawgaacagcattacrcctctgcattgtctctaacatgagtaggaataaaccctgtcttttttctgtagatcatacaagtgagtgcttgggattgttgaggcagcacatttgatgtgtctcttccttcccagttaggaaacctgctgccctacagtgatcccagcgtggtgtttgtcttcctgtccgtgtttgctgtggtgacaatcctgcagtgcttcctgattagcacactcttctccagagccaacctggcagcagcctgtgggggcatcatctacttcacgctgtacctgccctacgtcctgtgtgtggcatggcaggactacrtgggcttcmcactcaagatcttcgctgtgagtacctctggcctttcttcagtggctgtaggcatttgaccttcctttggagtccctgaataaaagcagcaagttgagaacagaagatgatwgtcttttccaatgggacatgaaccttagctctagattctaagctctttaagggtaagggcaagcattgtgttttattaaattgttwmcctttagtcttctcagtgaatcctggttgaattgaattgaatggaatttttccgagagccagactgcatcttgaactgggctggggataaatggcattgaggaatggcttcaggcaacagatgccatctctgccctttatctcccagctctgttggctatgttaagctcatgacaaagccaaggccacaaatagaactgaaaactcttgatgtcagagatgacctctcttgtcttccttgtgtccagtatggtgttttgcttgagtaatyttttctgaactaagcacaactgaggagcaggtgcctcatcccacaaattcctgacttggacacttccttccctcgtacagagcagggggatatcttggagagtgtgtgagcccctacaagtgcaagttgtcagatgtccccaggtcacttatcaggaaagctaagagtgactcataggatgctcctgttgcctcagtctgggctycataggcatcagcagccccaaacaggcacctctgatcctgagccatccttggctgagcagggagcctcagaagactgtgggtatgcgcatgtgtgtgggggaacaggattgctgagccttggggcatctttggaaacataaagttttaaaagttttatgcttcactgtatatgcatttctgaaatgtttgtatataatgagtggttacaaatggaatcattttatatgttrcttggtagcccaycactcccctaaagggactctataggtaaatactacttctgcaccttatgattgatccattttgcaaattcaaatttctccaggtataatttacactagaagagatagaaaaatgagactgaccaggaaatggataggtgactttgcctgtttctcacagagcctgctgtctcctgtggcttttgggtttggctgtgagtactttgccctttttgaggagcagggcattggagtgcagtgggacaacctgtttgagagtcctgtggaggaagatggcttcaatctcaccacttcgrtctccatgatgctgtttracaccttcctctatggggtgatgacctggtacattgaggctgtctttccaggtacactgctttgggcatctgtttggaaaatatgacttctagctgatgtcctttctttgtgctagaatctctgcagtgcatgggcttccctgggaagtggtttgggctatagatctatagtaaacagatagtccaaggacaggcagctgatgctgaaagtacaattgtcactacttgtacagcacttgtttcttgaaaactgtgtgccaggcagcatgcaaaatgttttatacacattgcttcatttaattctcacaaggctactctgaagtagttactataataaccagcaattttcaaatgagagaactgtgactcaaagacgttaagtaaccagctttggtcacacaactgttaaatgttggtacgtggaggtgaatccacttcggttacactgggtcaataagcccaggcgaatcctcccaatgctcacccaattctgtatttctgtgtcctcagagggggtacaactaggagaggttctgtttcctgagtacaggttgttaataattaaatatactagctctaaggcctgcctgtgatttaattagcattcaataaaaattcatgttgaatttttctttagtacttctttcttaatataatacatcttcttgaccaagtccaagaggaacctgygttggacagttttcatatgagatcaaattctgagagagcaagatttaaccctttttggttcaccttctgatcctcccctaaggaggtatacatgaaatatttattactcctgcctgaacttctttcattgaatatgcaattttgcagcatgcagattctggatttaaattctgagtcttaacttactggctgagggaccttggataggctccttatccctcagtttcctcatctctaaaatggggatggcacctgccccgtgggttgttggaaggacttacagaggtgcagaatgtacgttgtacatagcaggtttcagcaaatgttagctccctctttccccacatccattcaaatctgttccttctccaaaggatgtgtcaaggaggaaatggacctggctgggaaaccctcagaatactgggatgwtgctgagcttggctcatacctgtgctttgctttcaggccagtacggaattcccaggccctggtattttccttgcaccaagtcctactggtttggcraggaaagtgatgagaagagccaccctggttccaaccagaagagaatrtcagaaagtaagtgctgttgacctcctgctctttctttaacctagtgctgctgcctctgctaactgytgggggcaagcgatgtctcctgcctttctaaaagactgtgaaaccactccaggggcagagaaatcacatgcagtgtccctttccaaatcctcccatgccatttatgtccaatgctgttgacctattgggagttcacggtctcgatccctgagggacattttctttgttgtcttggcttctagaagagtatcttttacttgccccctcccaaacacacatttcatggtctcctaacaagctagaagaaagaggtaaagacaagcgtgattgtggaaccatagcctcgctgcctgcctgtgacatggtgacctgtgtatcagcctgtgtgggctgagaccaagtggctaccacagagctcagcctatgcttcataatgtaatcattacccagatccctaatcctctcttggctcttaactgcagacagagatgtccacagctcatcaaakgctctgccttctgggttctttgtgcttagagtggcttcctaaatatttaataggtcccttttctgccagtctcttctgtgcccatcccctgattgcccttggtaaaagtatgatgccccttagtgtagcacgcttgcctgctgttcctaatcatcttctcctacctcctctttacacctagctcctgtttcagtcacctagaaatgctcacagtcgctggaatatgtcatgttcttccacacctccatgcctttgtaggtactgtttgctctcacaggagaactttctctctaacttgcctatcttctcaactcctcctttctctccaagatctagttccggatcccctcccctgagcatccctccttggttctcaggtagtcagtcactctctgccctgaacttccatggcacgtgaaagaaaatctttttattttaaaacaattacagactcacaagaagtaatacaaattacatgagggggttcccttaaacctttcatccagtttccccaatggtagcagcatgtgtaactgtagaatagtatcaaaaccatgaaattgacataggtacaattcacaaaccttcttcagatttcactagctttatgtgcgctcatttgtgtgtgtgtgtgcgtatttagttctatgcaattttatcatgtgtgaattcatgtaattactagctcagtcaagctgcagaaatatctcattgtcacaaagctccttcatgctaccccttaatggccacagccacctcccttcttcctcagttcctgacacctgtcaaccactaatgcgttcctcgtttttacagttttattatttctagaatgttacataaatggaaccatacagtaggtatccttttgatactggctttttttttttttcactcagcagtattcccttagatctatccaagttgtgtgtgtcaacagttcattcctcttcactgctgagtagtgttccctgggaggggtgtatcacagttccatggcatttttagatgtattttttaaacagctttcagcatcctctattttaattgttcatcaagtcctttttcccaatagactctgaatgctcctttatcatcgtattcccatcaccaacatcagtacccaaataggccctaaataaacatttatagcctcctgcctgcctgagaaaccagggtggacatggagagaaggcacttctgaaagttcaagcgcagtgcsctgtgtccttacactscactcctcagtgctttctgtgggttcatttctgtcttctctcctgtcacagtctgcatggaggaggaacccacccacttgaagctgggcgtgtccattcagaacctggtaaaagtctacygagatgggatgaaggtggctgtcgatggcctggcactgaatttttatgagggccagatcayctccttcctgggccacaatggagygggraagacgaccaccatgtaagaagagggtgtggttcccgcagaatcagccacaggagggttctgcagtagagttagaaatttataccttaggaaaccatgctgatccctgggccaagggaaggagcacatgaggagttgccgaatgtgaacatgttatctaatcatgagtgtctttccacgtgctagtttgctagatgttatttcttcagcctaaaacaagctggggcctcagatgacctttcccatgtagttcacagaattctgcagtggtcttggaacctgcagccacgaaaagatagattacatatgttggagggagttggtaattcccaggaactctgtctctaagcagatgtgagaagcacctgtgagacgcaatcaagctgggcagctggcttgattgccttccctgcgacctcaaggaccttacagtgggtagtatcaggaggggtcaggggctgtaaagcaccagcgttagcctcagtggcttccagcacgattcctcaaccattctaaccattccaaagggtatatctttggggggtgacattcttttcctgttttctttttaatctttttttaaaacatagaattaatatattatgagcttttcagaagatttttaaaaggcagtcagaaatcctactacctaacacaaaaattgtttttatctttgaataatatgttcttgtttgtccattttccatgcatgcgatgttaggcatacaaaatacattttttaaagaatactttcattgcarattggaaacttcgtttaaaaaatgctcatactaaaattggcatttctaacccataggcccacttgtagttatttacygaagcaaaaggacagctttgctttgtgtgggtctggtagggttcattagaaaggaatgggggcggtgggagggttggtgttctgttctctctgcagactgaatggagcatctagagttaagggtaggtcaaccctgacttctgtacttctaaatttttgtcctcaggtcaatcctgaccgggttgttccccccgacctcgggcacygcctacatcctgggaaaagacattcgctctgagatgagcaccatccggcagaacctgggggtctgtccccagcataacgtgctgtttgacatgtgagtaccagcagcacrttaagaataggccttttctggatgtgtgtgtgtcatgccatcatgggaggagtgggacttaagcattttactttgctgtgtttttgttttttctttttttcttttttatttttttgagatggagtctcgctctgtagccaggctggactgtagtggcgcgatctcggctcactgcaaccttggcctcccaggttcaagcgattctcctgcctcagcctcccgagtagctgggactctaggcacacaccaccatgcccagctaatttttgtgtttttagtagagacggggtttcaccatgttggccaggatggtctcaatgtcttgacctcgtgatccgcccacctcggtctcccaaagtgctgggaacacaggcatgagccactgtgtctggccacattttactttctttgaatatggcaggctcacctccgtgaacaccttgagacctagttgttctttgattttaggagaagtgggaggtgaatggttgagctgtagaggtgacatcagcccagccagtggatgggggcttgggaaacattgcttcccattattgtcatgctggagggccctttagcccatcctctcccccgccaccctccttattgaggcctggagcagacttcccagacctggtagtgcttcagggccctggtatgatggacctatatttgctgcttaagacatttgctcccactcaggttgtcccatcagccataaggcccccagggagcccgtgtgatggagcagagagagacctgagctctgcaatcttgggcaaggcttttcccttatgtttcttcttatctaaagtgaacagctggggctcatgtgctccctcctcatctaaagtgaayacatggggctcatgtgcagggtcctccccgctttcagagcctgaggtcccctgaggctcaggaaggctgctccaggtgagtgccgagctgacttcttggtggacgtgctgtggggacagcccattaaagaccacatcttggggccctgaaattgaaagttgtaactgcctggtgcatggtggccaggcctgctggaaacaggttggaagcgatctgtcacctttcactttgatttcctgagcagctcatgtggttgctcactgttgttctaccttgaatcttgaagattatttttcagaaattgataaagttattttaaaaagcacggggagagaaaaatatgcccattctcatctgttctgggccaggggacwctgtattctggggtatccagtagggcccagagctgacctgcctccctgtccccaggctgactgtcgaagaacacatctggttctatgcccgcttgaaagggctctctragaagcacgtgaaggcggagatggagcagatggccctggatgttggtttgccatcaagcaagctgaaaagcaaaacaagccagctgtcaggtgcrgcccagagctaccttccctatccctctcccctcctcctccggctacacacatgcggaggaaaatcagcactgccccagggtcccaggctgggtgcggttggtaacagaaacttgyccctggctgtgcccctaggtcctctgccttcactcactgtctggggctggtcctggagtttgtcttgctctgtttttttgtaggtggaatgcagagaaagctatctgtggccttggcctttgtcgggggatctaaggtkgtcattctggatgaacccacagctggtgtggacccttactcccgcaggggaatatgggagctgctgctgaaataccgacaaggtgcctgatgtgtatttattctgagtaaatggactgagagagagcggggggcttttgagaagtgtggctgtatctcatggctaggcttctgtgaagccatgggatactcttctgttakcacagaagagataaagggcattgagactgagattcctgagaggagatgctgtgtctttattcatctttttgtccccarcatggtgcactaaatttatggttagttgaaagggtggatgcttaaatgaatggaagcggagaggggcaggaagacgattgggctctctggttagagatctgatgtggtacagtatgaggagcacaggcaggcttggagccaactctggctggccctgagacattgggaaagtcacaacttgcctcaccttctttgccgataataatagtggtgcttacctcatagaggattaaattaaatgagaatgcacacaaaccacctagcacaatgcctggcatatagcaagttcccaaataaaatgctactgttcttacctctgtgaggatgtggtacctatatatacaaagctttgccattctaggggtcatagccatacagggtgaaaggtggcttccaggtctcttccagtgcttacccctgctaatatctctctagtccctgtcactgtgacaaatcagaactgagaggcctcacctgtcccacatccttgtgtttgtgcctggcaggccgcaccattattctctctacacaccacatggatgaagcggacgtcctggggkacaggattgccatcatctcccatgggaagctgtgctgtgtgggctcctccctgtttctgaagaaccagytgggaacaggctactacctgaccttggtcaagaaagatgtggaatcctccctcagttcctgcagaaacagtagtagcactgtgtcatacctgaaaaaggtgagctgcagtcttggtgctgggctggtgttgggtctgggcagccaggacttgctggctgtgaatgatttctccatctccaccccttttgccatgttgaarccaccatctccctgctctgttgcccctttgaaatcatatcatacttaaggcatggaaagctaaggggccctctgctcccattgtgctagttctgttgaatcccgttttccttttcctatgaggcacagagagtgatggagaaggtccttagaggrcattattatgtcaaagaaaagagacttgtyaakaggtaagagccttggctacaaatgacctggtgttcstgctcattacttwtcaatctcattgaccttaacttttaaactataaaacagccaatatttattaggcwctgatttcatgccagagacactctgkkcatgaaagaaagtaatgataatagttaattttatatagcgttgwtaccatttacaaccttttttttttttttaacctctatcatctcaattaaagkgcagagagaccctgggaagaaggtaactatatttattatcccagatgagggaagtgaggcttgtagggaattggtagctgattcaaggtcacccagcaggtaaataacagtggtgggaccagacccaattaccaggtatgttttcctctgtaccgcagtacatgcctgagatttatttgtgtgttgaagccagtggtacctaatgtatttacatcccaacctgaaactcctatccacttatttaccttttaatgagcctcttaactcaagtgcagtctgaggaccagcagcatcaggatcacttgggaacttgttagaaattcagcaacctgggcccagctcagacctaccgaatcagaatctgtgcattttaacaaggttcttgagtggttgaacacacattaaagcatgagaagcattgaactagacatgtagccaggtaaaggccttgcctgagatggttggcaaaggcctcattgcagcattcattggcaggccacagttcttttggcagctctgcttcctgacctttcaccctcaggaagcraggctgttcacacggcacacacatgccagacagggtcctctgaagccacggctgccagtgcrtgtgtcccagggaaagctttttcctttagttctcacacaacagagcttcttggaagccctccccggcraaggtgctggtggctctgccttgctccgtccctgacccgttctcacctccttctttgccatcaggaggacagtgtttctcagagcagttctgatgctggcctgggcagcgaccatgasagtgacacgctgaccatcggtaaggactctggggtttcttattcaggtggtgcctgagcttcccccagctgggcagagtggaggcagaggaggagaggtgcagaggctggtggcgctgactcaaggtttgctgctgggctggggctgggtggctgcgggkgtgggagcagcttggtggcgggttggcctaatgcttgctggggtgcctggggctcggtttgggagctagcagggcagtgtcccagagagctgagatgattggggtttggggaatcccttaggggagtggacactgaataccagggatgaggagctgagggccaagccaggagggtgggatttgagcttagtacataagaagagtgagagcccaggagatgaggarcagccttccagatttttcttgggtagcgtgtgtaggaggccagtgtcaccagtagcatatgtggaacagaagtcttgrcccttgctatctctgcctagtcctaatggctgrcttttcccaggaaggcttctgcttccatggactgttagattaaccctttatttaggtaaatgagggaacctactttataagcataggaaagggtgaagaatcttttaagattcctttactcaagttttcttttgaagaatcccagagcttaggcaatagacaccagactttgagcctcagttatccattcacccatccacccacccacccacccatccttccatcctcccatcctcccattcacccatccacccatccagctgtccacccattctacactgagtacctataatgtgcctggctttggtgatacaaaggtgaataagacatagtcctttcctttgcccccaaccctcagaccagagatgaacatgtggaatgacctaaacacctggaacaggtgtggtgtatgagcggcaggcctctgatgagagggtgggggatggccagccctcactccgaagcccctctgagttgattgagccatctttgcattctggtccctgcagatgtctctgctatctccaacctcatcaggaagcatgtgtctgaagcccggctggtggaagacatagggcatgagctgacctatgtgctgccatatgargctgctaaggagggagcctttgtggaactctttcatgagattgatgaccgrctctcagacctgggcatttctagttatggcatctcagagacgaccctggaagaagtaagttaagtggctgactgtcrgaatatatagcaaggccaaatgtcctaaggccagaccagtagcctgcattgggagcaggattatcatggagttagtcattgagtttttaggtcatcgacatctgattaatgttggccccagtgagccatttaagatggtagtgggagatagcaggaaagaagtgttttcctctgtaccacagtacatgcctgagatttgtgtgttgaaaccagtggtacctaacacatttacatcccaaccttaaactcctatgcacttatttaccctttaatgagcctctttacttaagtacagtgkgaggaacagcggcatcaggatcacttgggaacttgttagaaatwcagcaacttgsgcccagctcagacctactgaatcagaatcaggagcaattctctggtgtgactgtgtcacagccaggtatcaactggattctcatacataggaaatgacaaacgtttatggatggatagtctacttgtgccaggtgctgagatttgttttttgttttttgatttttttttaatcactgtgacctcatttaattctcaaaaaaagatgaaaaaatgaacactcaggaatgctgacatgagattcagaatcaggggtttggggcttcaaagtccatcctctctttatccatgtaatgcctccccttagagatacaacatcacagaccttgaaggctgaaggggatataaaagctgtctggccaagtggtctccaagcttgacagtgcagcagaatcacctggggatattattaaaaataaacatactaaggtttggcttcagggcctgtgaatcagaatttctggaggtgaggccttgaagtctgtatttctattgcatactttggacacagtggtctatagactagagtttggaaatgattgcgctcattcagattctcttctgatgtttgaattgctgccatcatatttctagtgctctatttcctcctgctcattctgtcttggataacttatcatagtactagcctactcaaagatttagagccacagtcctgaaagaagccacttgactcattccctgtaggttcagaataaatttcttctgcgcagtgtctgtcatagctttttttaaatttttttttatttttgatgagactggagttttgctcttattgcccaagctggagtgcagtggtgcgattttggctcactgcaacctccacctcccaggttcaagcgattctcctgcctcagcctcccaagtagctgagattacaagcatgtgctaccacgcccagctaattttgtatttttagtagagatgggttttatccatgttggtcaggctggtctcgagctccagacctcaggtgatctgcccgcctyggcctcccaaagtgctgggattataggcctgagccacagcgctcagccataactttaatttgaaaatgattgtctagcttgatagctctcaccactgaggaaatgttctctggcaaaaacggcttctctcccaggtaactctgagaaagtgttattaagaaatgtggcttctactttctctgtcttacggggctaacatgccactcagtaatataataatygtggcagtggtgactactctcgtaatgttggtgcttataatgttctcatctctctcattttccagatattcctcaaggtggccgaagagagtggggtggatgctgagacctcaggtaactgccttgagggagaatggcacacttaagatagtgcctyctgctggcyttctcagtgcacgagtattgttcctttccctttgaattgttctattgcattctcatttgtagagtgtaggtttgttgcagatggggaaggtttgttttgttgtaaataaaataaagtatgggattctttccttgtgccttcagatggtaccttgccagcaagacgaaacaggcgggccttcggggacaagcagagctgtcttcgcccgttcactgaagatgatgctgctgatccaaatgattctgacatagacccaggtctgttagggcaagatcaaacagtgtcctactgtttgaatgtgaaattctctctcatgctctcacctgttttctttggatggcctttagccaaggtgatagatccctacagagtccaaagagaagtgaggaaatggtaaaagccacttgttytttgcagcatcgtgcatgtgatcaaacctgaaagagcctatccatatcacttcctttaaagacataaagatggtgcctcaatcctctgaacccatgtatttattatcttttctgcggggtcctagtttcttgtatacattaggtgtttaattgttgaacaaatattcattcgagtagatgagtgattttgaaagagtcagaaaggggaatttgctgttagagttaattgtaccctaagacttagatatttgaggctgggcatggtggctcatgccagtaatcccagcgctttgagaggctgaggtgggtagatcacctgaggtcaggagtttgagaccagtctgaccaacaaggtgaaaccccgtctctactaaatacaaaaaattagccgagtgtggtggcacatgcctgtcatcccagctacttgggaggctgaggcaggagaatcgcttgaacccaggaggcagaggttgcagtcagccacggttgcgccattgcactccagactgggcaacaagagtgaaaactccatctcaaaaaagaaaaaaaaagaattagatattttggatgagtgtgtctttgtgtgtttaactgagatggagaggagagctaagacatcaaacaaatattgttaagatgtaaaagcacatcagttaggtatcattagtttaggacaaggatttctagaaaatttttaggaacagaaaactttccagttctctcacccctgctcaaagagtgtatggctcttacattatatataactgcctgacttcatacagtatcagtacttagatcatttgaaatgtgtccacgttttaccaaaatataatagggtgagaagctgagatgctaattgccattgtgtattctcaaatatgtcaagctacgtacatggcctgtttcatagagtagtctataagaaattgatgacttgattcatccgaatggctggctgtaacacctggttacgcatgaacacctcttttcagttgtctcaagacacctttcttttctgtacttatcagacaaggactgaaaggcagagactgctactgttagacattttgagtcaagcttttccttggacatagctttgtcatgaaagccctttacttctgagaaacttctagcttcagacacatgccttcaagatagttgttgaagacaccagaagaaggagcatggcaatgccgaaaacacctaagataataggtgaccttcagtgttggcttcttgcagaatccagagagacagacttgctcagtgggatggatggcaaaggrtcctaccaggtgaaaggctggaaacttacacagcaacagtttgtggcccttttgtggaagagactgctaattgccagacggagtcggaaaggattttttgctcaggtgagacgtgctgttttcgccagagactctggcttcatgggtgggctgcaggctctgtgaccagtgaaggcaggatagcatcctggtcaagatatggatgccggagccagatttatctgtatttcaatcccagttctattccttgccagttgtgtatccgctggcaagttacttctctatgcctcaatctcctcatctgtaaaatggggataataatattacctgcaatacagggttgttacgaaaataaaaatgaataggtgcttagaatggggcctgacattagtaagtgcttagttttgtgtgtgtatatgttatttttattttggaggagaacataaaaargacaaagtgtagaaaaactggttgggtgtattcagctgtcataacatgagagttgttatgcccagatgcacttgacatgtgaatttattagaaacatgatttttctctgagttgatgtttaactcaaactgatagaaaagataggtcagaatatagttggccaacagagaagacttgttagactattgtctgcatgtcagtgtttgcatgctaacttgcttagttagaaaggttaaattttttcactctataaaatcaagaaatatagagaaaaggtctgcagagagtctttcatttgatgatgtggatattgttaagagcgggagtttggagcatacagagctcaagttgaatcctgactttgctacttattggctatatgaccttgggcaagctgcttagtctctctgatcctcagttacctttgtttgttgatgatgaccattgataacacaaccataaataatgacaacatagagatagttctcattatagtagttgttatacagaattattcactcaatgttaattttctgcattgaaatcccagaacattagaattgggggcattatttgaatctttaaggttataaggaatacatttctcagcaataaatggaaggagttttgggttaacttataaagtatacccaagtcatttttttttcagagaagatatggtagaaagtcttaggaggttgaagaaggaattggatatttattctttctgagactatcatgggagataatgactatggttgtccatgattggagccgttgctgtagagttggttttattatagtgtaggatttgaatgggccatgtgttctcagacctcagattaaaatgagaaaactgaggccagtggggagcgtgacttcacatgggtacacttgtgctagagacagaaccaggattcaggacttctggctcctggtcctgggttcatggcccaatgtagtctttctcagtcttcaggaggaggaagggcaggacccagtgttctgagtcaccctgaatgtgagcactatttacttcgtgaacttcttggcttagtgcctctgccaggtggccataacctctggccttgtgttgccagagaaaaggtttagttttcaggctccattgcttcccagctgccaagaatgccttggtgcagcacagtcataggccctgcattcctcattgccgtgctggttggtcggggaggtgggctggactcgtagggatttgccccttggccttgtttctaacacttgccgtttcctgytgtccccctgccccctccactgcctgggtaaagattgtcttgccagctgtgtttgtctgcattgcccttgtgttcagcctgatcgtgccaccctttggcaagtaccccagcctggaacttcagccctggatgtacaacgaacagtacacatttgtcaggtatgtttgtcttctacatcccaggaggggrtaagattcgagcagaccaaagatgtttacgagggccaagggaatggacttcagaattacacggtggaatgaattttactgctgcggctcaggtccctgtataagctaatactgcatgcrtagaacagcagcgaactaaccctgaataataggccagtcttctgttgagcctttcagcctctctcctcttcatcctactgttgtcaggaacagccacatgtgttttaggtgaaataatccacccttgcaaaaatccatgattaagttataaaatatttggatttgtggagctgtgttttaattctgtaactgagtcacagggcacactgtcaaagcatagaacctccagagacttgttttctgcaaagtataattcatgtaattattatctattctgttatatttgggatgttaggtagtgtttgttctttagataaaaatatcccccactctgtaacaatacattaaatcaaagaaaaggacaaaggatttttctgggtcttgttagcaggagctttcttcagtcctgaaagatttgtagacctgtagatgggggaactgtgtcagtgatacaaaagggaagcatttaaaaaaaaaaaagtatatatatatatatatatatatatatgtaatgtgaattggcctctttttctctaagcccacattttcttcttacatagttcaggtttactttattttttcctttccggctgctgaccctgtattgcccgtagttgtggaacatagcatgtgtttgtgacctgtgcctgttatttttgtgctttctagttgtgcatgcaaagagtacaaagttttcttgccctttcttggaaaatcctgcttgtctgtgccaaagggataattgtgaaagcacttttgaaatacttaatgagttgattttcttcaaattaaaaaawatatataaatgtatmtgtgtatgtacatgtgtgtacacatacacacctttatacatacagcccatttaaaacaagctccactttggagtgctctacgtcaccctgatgccgaatacagggccagagtctgagatccttctgggtggtttctgtgttttgttcatttctgttttaagagcctgtcacagagaaatgcttcctaaaatgtttaatttataaaaacatttttatctctcgattactggttttaatgaattactaagctggctgcctctcatgtacccacagcaatgatgctcctgaggacacgggaaccctggaactcttaaacgccctcaccaaagaccctggcttcgggacccgctgtatggaaggaaacccaatcccgtgagtgccactttagccataagcaggcttcttgtgcttgttgcctggtttgatttctaatatgctgcatttatcaactgcatgccacattgtgaccgccagcatttgccctttgaattattattatgttttatttacaaaaagcgaaggtagtaaccgaactaaattatctaggaacaaacgtttggagagtcttctaacaccgtgcaaagcacgtcattacagacatttgtttactgatttagaaccttaatatttaatttaaatagcactttacacttactgatgaaatgcttttcctttcyttctctcccagcccctgtacttaagtgcttcaataggctctcattatatatgatttttaggttttgyttatcagcttcttcgcttttataatctgaaaagatggcatatgaatttttataaaaagggacactttcttcttctcaaattgtatatttttattgtactttccttcaaaacccccttttaaaaagtaagcagtrgataaataaattcagtgaagcatccatatgacycttaagtgagtgtaggggaagggaggtcaccagatcactgtgagtgaagatggtggagaggtgaggatcttatgaggccgtgctcaaggctggtagaggtgggttagtgtttccaggtttaggcagaatctcagctgaggtcatgaaacaacagtgatctctgaaaaattatggcaaggtgggaaggtgctggagaattggagagggggcaaacttgactttcaagtttcaatgggaagataggtgactctgcacaccacagaacagtgagcatgataacctgtttatacaaggttctagagcagatttctaaatggatagctactgtgtgcttgtttgttcttaattagtattggatagttactaaatacttgttagtacttagtacataatgggtggtaaatcctagcagctaatattggttcccaaataaccagatgacaaggatagagaaggacacagacacggcctatctggatttcatggtgcctttsattttccacatgaaggttgtgtagggaagatagaagcatgagatgagatgataatatagttatctggattcatcactggccagctgaaccatatgaactcatggattgatgctagcttaggaaggctctgtaggagccagaactgggctgagagccagcccatagagacaaaagaggcccggccctgacatcagagggttcaaacatgatgtctgagccccacctacagtctgccggaggtggttggaaggaagagcctttatccttacaattcttactgaaattcaaatttttaggttttgcaaaaaaatggtggacctgaaggaaatttgacaggagcatgtctcagctgtatttaaatttgtctcagccaatccccttttgaatgttcagagtgtaagcttcaggagggcagcgcgtcttagtgtgacttttctggtcagttcaggtgctttaaggagacaattagagatcaatctggaaaacttcatttgaatttttaatacataagaaaacaataagaaatagttaaaaatatatatttatawwatatatrtgtgtgtgtgtgtgtgtgtgtgtrtrtatatatatatattttatttatttatttttttttgagatggagtctcgctctgttgcccaggctggagtgcagtggctcaatcttggctcactgccacctctgcctcccaggttcaagtgattctcctacctcagcctcctgagtagctgggattacaagcatgtgccaccacactggctaatttttctaattttagtagagatggagtttcaccatgttggacaggatggtcttgaactcctgacttagtgatccacccgccttcgcctcccaaagttctgggattacaggcatgagccatcgtgcctggcaattatatttaatatttaataataaggaaataattgctgtaactttactttaaattgtggaattctgaaactggaagggaactggaaatgacttgttgaatcaaatcattttaaacttttattttgccagtggaaaaaataagcccccaaaagagcaggggacctgctgatgtcccacagtaattcagagctggagatgaggttgaaggctttgtgtcttatctccagggaaaatttgtagacagcgtagctctttatgtgacgagcattctcaccccagtcatcccccaattctctactcatttgagaacataaattggatcttgccagtctctactcatttttcagcacatcgagcataagatccagactctttcccaggcctctctcatctggctcctctcctcctcctttatcattactcttcttcgtagcttatcctactccarccatgctgtcttcctattattcctaaaaartagaaatgcatttcttcctagggcctttgtacctgcacttgccatcgcttttgctcagaatgttctttttgccaagcttttgcccagcttgttctccatcattgttatgttttggctgaaatgtcttctcttagtaggttcattctccccagtcactgtctttttattttgctttattttgggccatctaaggttatcttattagtgtatttgttgttcgtctcctccatgggcatacacctccatgaaggcaggtattttcaccttaggccctcgaatatactggacagcatctggcacgtagtagatgctcaacgaatgtttgttgtgtgagcaaatggttggttgattggattgaactgagttcagtatgtaaatatttagggcctctttgcattctattttacttatgtataaaatgatacataatgatgatataaatgatgtcacagtgtacaaggctgttgtgggatcaagcaatcaaatgagatcatgcttgtcttttccaaatggtgagggaatagatgcatgtttrtggttgttacggaatgatcctgtgctcctgaggcaacagaaaggccaggccatctctggtaatcctactcttgctgtcttccctttgcagagacacrccctgccaggcaggggaggaagagtggaccactgccccagttccccagaccatcatggacctcttccagaatgggaactggacaatgcagaacccttcacctgcatgccagtgtagcagcgacaaaatcaagaagatgctgcctgtgtgtcccccaggkgcaggggggctgcctcctccacaagtgagtcactttcagggggtgattgggcagaaggggtgcaggatgggctggtagcttccgcttggaagcaggaatgagtgagatatcatgttgggagggtctgtttcagtcttttttgttttttgtttttttttctgaggcggagtcttgctctgtcgcccaggctggagtgctgtggcatgatcttgcctcactgcaacctccacctcccaggttcaagcgattctcctgcctcagcctcctgagtagctgggattacaggcacgcaccaccatgtctggctaatttttgtgtttttagtagagatagggtttcgccgtgttggctaggctggtctggaattcctgacctcaggtgatccacccgcctcggcctcccaaagtgctgggattacaggcgtgagccactacgcccagccctgtttcagtctttaactcgcttcttgtcataagaaaaagcatgtgagttttgaggggagaaggtttggaccacactgtgcccatgcctgtcccacagcagtaaagtcacaggacagactgtggcaggcctggcttccaatcttggctctgcaacaaatgagctggtagcctttgacaggcctgggcctgtttcttcacctctgaattagggaggctggaccagaaaactcctgtggatcttgtcaactctggtattcttagagactctgtttgggaaggagtcctgagccattttttttttcttgagaatttcaggaagaggagtgcttatgatagctctctgctgcttttatcagcaaccaaattgcaggatgaggacaagcaattctaaatgagtacaggaactaaaagaaggcttggttaccactcttgaaaataatagctagtccaggtgcggggtggctcacacctgtaatctcagtattttgggatgccgaggtggactgatcacctaaggtcaggagttcgaaaccagcttggccaatgtggcgaaaccctgtctctactaaaaattcaaaaattagccaggcatggtggcacatgcctgtaatcccagttacttgggaggctgaagcaggagaattgcttgaacctgggaggtggaggtcgcagggagccaaaattgcgccactgtactccagcctgagcaacacagcaaaactccatatcaaaaaataaaatgaataaaataacagctaatctagtcatcagtataactccagtgaacagaagatttattaggcatagtgaatgatggtgcttcctaaaaatctcttgactacaaagaatctcatttcaatgtttattgtttagatgttcagaataaattcttgggaaagaccttggcttggtgtaagtgaattaccagtgccgagggcagggtgaaccaagtctcagtgctggttgactgagggcagtgtctgggacctgtagtcaggtttccggtcacactgtggacatggtcactgttgtccttgatttgttttctgtttcaattcttgtctataaagacccgtatgcttggttttcatgtgatgacagagaaaacaaaacactgcagatatccttcaggacctgacaggaagaaacatttyggattatctggtgaagacgtatgtgcagatcatagccaaaaggtgactttttactaaacttggcccctgccktattattactaattagaggaattaaagacctacaaataacagactgaaacagtgggggaaatgccagattatggcctgattctgtctattggaagtttaggatattatcccaaactagaaaagatgacgagagggactgtgaacattcagttgtcagcttcaaggctgaggcagcctggtctagaatgaaaatagaaatggattcaacgtcaaattttgccacttagtagcaacttgaccaggtaactggttatccttttaaagccttagtttatctaaattgtgatattaatgttgctcttataagtttgtcatgaggactaaattaaatggtgtacatagagtgccttgggtactctctgatgggggactccatgataatttgtggtctcatggagggagctctgggaaggtttaggagcctgccttggctctgcagccttgggagagccttctagcttcccaggacatggcagcctagtgttgaatgcttggctcagcaaatgtttgttctcgtttccttcccatcaacttggtcagttggggtctttcagttaggagtatctcagtgactttaaatggcatgggcatgctggagtgatagtgaccatgagtttctaagaaagaagcataatttctccatatgtcatccacaattgaaatattattgttaattgaaaaagcttctaggccaggcacggtggctcatgcctgtaatcccagcactttaggaggccaaggcgggtggatcacttgaggtcaggagtttgagaccagcctggccaacatggggaaaccctgtctctactaaaaatacaaaataagctgggcgtggtggtgcgtgcctgtaatcccagctacttgggaggctgaggcaggagaaytgcttgaatctgggaggcggaggttgcagtgagctgagttcatgccattgcattccagcctgggcaacaagagcgaaaccatctcccaaaagaaaaaaaaaagaaagaaaaagcttctagtttggttacatcttggtctataaggtggtttgtaaattggtttaacccaaggcctggttctcatataagtaatagggtatttatgatggagagaaggctggaagaggcctgaacacaggcttcttttctctagcacaaccctacaaggccagctgattctagggttatttctgtccgttccttatatcctcaggtggatatttactccttttgcatcattaggaataggctcagtgctttctttgaactgattttttgtttctttgtctctgcagcttaaagaacaagatctgggtgaatgagtttaggtaagttgctgtctttctggcacgtttagctcagggggaggatggtgttgtaggtgtcttggattgaagaaagccttrgggattgtttgtcactcacacacttgtgggtgccatctcactgtgaggaggacagaagccctgtgaacatgtggagcacacaggggcacagacagatttagattaggcctgctttatagagtttctgcctagagcatcatggctcagtgcccagcagcccctccagaggcctctgaaatatttgatatactgatttccttgaggagaatcagaaatctcctgcaggtgtctagggatttcaagtaagtagtgttgtgaggggaatacctacttgtactttccccccaaaccagattcccgaggcttcttaaggactcaaggacaatttctaggcatttagcacgggactaaaaaggtcttagaggaaataagaagcgccaaaaccatctctttgcactgtatttcaacccatttgtccttctgggttttgaaggaacaggtgggactggggacagaagagttcttgaagccagtttgtccatcatggaaaatgagataggtgatgtggctacgtcagggggcccgaaggctccttgttactgatttccgtcttttctctctgccttttccccaagggccaggacccctggatctctgggcagagcagacgcaggcccctataatagccctcatgctagaarggagccrgagcctgtgtataaggccagcgcagcctactctggacagtgcagggttcccactctcccaactccccatctgcttgcctccagacccacattcacachcgagccactgggttggaggagcatctgtgagatgaaacaccattctttcctcaatgtctcagctrtctaactgtgtgtgtaatcaggccaggtcctccctgctgggcagaaaccatgggagttaagagattgccaacatttattagaggaagctgaygtgtaacttctctgaggcaaaatttagccctcctttgaacaggaatttgactcagtgaaccttgtacacactcgcactgagtctgctgctgatgatactgtgcaccccactgtctggsttttaatgtcaggctgttcttttaggtatggcggcttttccctgggtgtcagtaatactcaagcacttcctccgagtcaagaagttaatgatgccaycaaacaaatgaagaaacacctaaagctggccaaggtaaaatatctatcgtaagatgtatcagaaaaatgggcatgtagctgctgggatataggagtagttggcaggttaaacggatcacctggcagctcattgttctgaatatgttggcatacagagccgtctttggcatttagcgatttgagccagacaaaactgaattacttagttgtacgtttaaaagtgtaggtcaaaaacaaatccagaggccaggagctgtggctcatgcctgtaatcctagcactttgggaggccgaagcgggtggatcacttgaggtcaggagttcgagaccagcctggcctacatgacaaaaccccgtatctactaaaaatacaaaaaaattagctgggcttggtggcacacacctgtaatcccagctacttgggaggctgaggcaggagaattgcttgaaccctgtaggaagaggttgtagtgagccaagatcgcaccgttgcactccagcctgggcaacaagagcaaaactccatctcaaaaaacaaattaaatccagagatttaaaagctctcagaggctgggcgcggtggcttacacctgttatcccagcattttgggatgccraggcgggcaaagcacaaggtcaggagtttgagaccagcctggccaacatagtgaaaccctgtctytgctaaaaacatagaaaaattagccgggcatggtggcgtgcgcctgtaatcccagctactcgggaggctgaggtgagagaattrcttgaacccgggaggcggaggttgcagtgagcccagattgcaccactgcactccagcctgggcgacagagcaagactccatctcaaaaaaagctctcagaacaaccaggtttacaaatttggtcagttggtaaataaactgggtttcaaacatactttgctgaaayaatcactgactaaataggaaatgaatctttttttttttttttttaagctggcaagctggtctgtaggacctgataagtactcacttcatttctctgtgtctcaggtttcccatttttaggtgagaattaaggggctctgataaaacagaccctaggattgtggacagcagtgrtagtcctagagtccacaagtctgcttttgagtgatgggcccatgtatctggcacatctgcaggcagagcgtggttctggctcttcagatgatgccggtggagcactttgaggagtcctcaccccaccgtgataaccagacattaaaatcttggggctttgcatcccaggatttctctgtgattccttctagacttgtggcatcatggcagcatcactgctgtagatttctagtcacttggttctcaggagccgtttatttaatggcttcacatttaatttcagtgaacaaggtagtggcattgctcttcacagggccgtcctgttgtccacaggttccagattgactgttgccccttatctatgtgaacagtcacaactgaggcaggtttctgttgtttacaggacagttctgcagatcgatttctcaacagcttgggaagatttatgacaggactggacaccaraaataatgtcaaggtaaaccgctgtctttgttctagtagctttttgatgaacaataatccttatgtttcctggagtactttcaactcatggtaaagttggcaggggcattcacaacagaaaagagcaaactattaactttaccagtgaggcagtacggtgtagtgtagtgattcagagaatttgctttgccaccagacataccaggtaaccttgactaagttacttaacctatctaaacctcagttycctcatctgtgaaatggagacagtaatcatagctatttccaaactgttgtgagaattcaatgagttaaaggtataaggtcctcaccacagcgcctgcccacatagtcagtgatcactatgtcctgaacactgtaattacttcgccatattctctgatcatagtgttttgccttggtatgtgactagaatttctttctgaggtttatgggcatggttggtgggtatgcacctgcctgcaggagcccggtttgggggcattaccttgtacctggtatgttttctttcaggtgtggttcaataacaagggctggcatgcaatcagctctttcctgaatgtcatcaacratgccattctccgggccaacctgcaaaagggagagaaccctagccattatggaattactgctttcaatcatcccctgaatctcaccaagcagcagctctcagaggtggctcygtaagtgtggctgtgtctgtatagatggagtggggcaagggagagggttatggagaaggggagaaaaatgtgaatctcattgtaggggaacagctgcagagaccgttatattatgataaatctggattgatccaggctctgggcagaagtgataagtttacgaattggctggttgggcttcttgaactgcagaagagaaaatgacactgatatgtaaaaatcgtaacatttagtgaattcatataaagtgagttcaaaaattgttaattaaattataatttaattataagtgtttaatcagtttgatttgtttaaaaaccactgttttaaatttggtggaatatgtttttattagcttgtatctttaattcctaaattaagctgtgtgtgtgtgtgtgtgtgtgtgtgtgtgtgtgtgtgtgtgtgaagtttaaagccaggatgagctagtttaaagtatgcagcctttggagtcatacagatctgggtttgaatctggtctctaaactttatagatgtatgatattaaatgaggcagttcatgtaaattgccaagcccagcactcagcacagagttgatatttcacacacattagatacctttcctgtatgtggagcatggcagttcctgtttctgctttactcctacaggatactaatataggacactaggatctttataccaagaccccatgtaatgggcttatgagaccattcttcttataaaaatctgacagaatttttgtatgtgttagatcaataggctgcatactgttattttcaagttgatttacagccagaaatattaatttatttgagtagttacagagtaatatttctgctctcatttagttttcaagccccactagtcctttgtgtgtgaaaatttacaacttactgctcttacaaggtcatgaacagtggaccaaagtgaatgccattaaccactctgacttccttcattagttttattgtgacagtggactcttttgacctcagtaataccagtttggcatttacattgtcatatttttagacttaaaaatgatcatcttaaccctgaataaaatgtgtctggtgaacagatgtttttccttgggctgtgcctcagatatctctgtgtgtgtgtacgtgtgtgtttgtctgtgtgtccatgtcctcactgattgagccctaactgcatcaaagacccctcagattttcacacgctttttctctccaggatgaccacatcagtggatgtccttgtgtccatctgtgtcatctttgcaatgtccttcgtcccagccagctttgtcgtattcctgatccaggagcgggtcagcaaagcaaaacacctgcagttcatcagtggagtgaagcctgtcatctactggctctctaattttgtctgggatatggtaaggacacaggcctgctgtatctttctgatgtctgtcagggccatggattgayatggataagaaagaaagagctctggctatcatcaggaaatgttccagctactctaaagatgtatgaaaaagaaatagccagaggcaggtgatcactttcatgacaccaaacacagcattgggtaccagagttcatgtcacaccagagggaaaattctgtacacaatgatgaaaattaataccactaccacttaagttcctatgtgacaactttcccaagaatcagagagatacaagtcaaaactccaagtcaatgcctctaacttctctgatgggttttaacctccagagtcagaatgttctttgccttactaggaaagccatctgtcatttgaaaactctgtacattttatcagcagcttatccatccattgcaaatatgtttttgtgccagccacaatatattgcttctatttggaccaatatgggggatttgaaggaattctgaagttctaattatatttcaactctactttacaatatctccctgaaatatatctccctgtaacttctattaattataagctacacagagcaaatctaattcttctcccaccgaacaagtccctggatatttaaaaataactctcatactctcatttaacctgagtattacccagataagatgatatatgagaatacaccttgtaacctccgaagcactgtacaaatgtgagcaatgatggtggagatgatgatgagatctttgctgtttataccaagccccttagactgtgtcactcttctgatccggttgtccttgtatggccatgctgtatattgtgaatgtccgttttcaaaagcaaagccaagaattaaccttgtgttcaggctgtggtctgaatggttatgggtccagagggagttgatctttagctcacacttctattactgcagcacaaagattttgcattttggaaggagcaccgtcttactggcaacttagtggtaaaccaaaacctccatttcacacaaatgattgtgaaattcgggtctccttcattctatacaaattcatttgatttttttgaaactaaactttatatttatccatattaaattacatgggttttatttttgttttatcttgattcagtaattactcctttcagtaaacacagactgagtgctgtgtgtctgacttatgccaggcataggtgattcagagatgaaaggtcaagtccctgaacccatctcttgtcttcctgggtattatctgtccctccctgctttagagctcctgaaatttgctagaagcatgtcttcatctaagttgttgataaacacatcaagtaggattggactgaggcagagccctgtagtctgaagctgcagttcttctagcggctgacaagccccactatcacttccctgctggtgctttgctctgccagctgtgaattctcataattgtcctatcgtcaagtctttatttctgcattttactgcttgatacactgtcaggacagactttaaaattattctcagtgcgatgaaacaattctgacattcatgttatgagcagttacctcataaatagattacatgtgagattgaacttgggcagactataatatagcattaatgaygaaacagacacagtcatcttcgggaagaagaatagaggcttatttgctgcctgtgaaattaaaattactctgactgggartccatcgttcagtaagtttactgagtgtgacaccttggcttgactgttggaaagacagaaagggcatgtagtttataaaatcagccaargggaaaatgcttgtcaaaatgtattgtcgggtattttgattaatagtttatgtggcttcattaattcagagttactctccaatatgtttatctgccctttcttgtctgataatggtgaaaactygtgtgatgcattgtatatttgatttaggggtgaactggatgtctttgttttcacttttagtgcaattacgttgtccctgccacactggtcattatcatcttcatctgcttccagcagaagtcctatgtgtcctccaccaatctgcctgtgctagcccttctacttttgctgtatgggtaagtcacctctgagtgagggagctgcacagtggataaggcatttggtgcccagtgtcagaaggagggcagggactctcagtagacacttatctttttgtgtctcaacaggtggtcaatcacacctctcatgtacccagcctcctttgtgttcaagatccccagcacagcctatgtggtgctcaccagcgtgaacctcttcattggcattaatggcagcgtggccacctttgtgctggagctgttcacygacaatgtgagtcatgcagagagaacactcctgctgggatgagcatctctgggagccagaggacagtgtttaattgtgatcttattccacytgtcagtggtattgacactgctgactgccttgtcctgtcttcagagtctgtcttccctgagaaggcaaagcacctttctttcttgctgtgccttacattttgctggtcaagcctttcagtttcttttgacagttttttttacttctttcttttttcaatgttgctcttaccaagagtagctcctctgccttccactttacacatgagagctgggcgacgccattcagtcctaaggcttttaccatcacctctcttggtgtttttattgtcatctctaagatcaatgcctttagccttgatcataaccttgaactctaatctcaaattctcacttgcctagtggattgctccatttagatagtatatagataccccaacctggayatgtcctagttttctttccccttggaacttaatgcttttcttgccatccctgtcacactcagtggcactaccatccactcggttgcccaagctggctcttagagttatcctagatgcttgctttgctgttgcagatttcccacattcaactggttatgttgtcagttcttccaggtatggacctctaaaataaggcttcctctccattccggttgtcattgcctttgtccaaacacagcacacaaggccttttacagttgcacaactcttcytgtccatacccaccacaccctttcccagctgtaagcttcagatgagttgcctccaaccaccatgctcctgtaggcctggcttgaaatgcccttcttctgtcacagggtctggtagtatatcccttgcccttcaagatttagctaaaatgtgaagctttccttacctgctgggaggtgttctctcttttctctgtgctctcagagtccttagtccatgcctccagtacaacgtacatccacttacatggtaatttcctgtttacatacttttcctactyggagtggagtctgtttcttaataattttgcctctcccatgccctagcacagtgcatccagcgtatagccccttattcagttggtagatatttggccactgttgccttgtgggatcataagttctgatgtatttgagaagaatttctaaaattctgacaaaatcctgaaactcaaatattgacccagacatgagcaatttgcttttcaaatgctaagggatttttaatggatttgctttaattaaatctagcctgtttctaagctttattcattatttctccatactcagagcatttctccagattttctaaagaatagaattttattgctacatatcatcagctatgcctgctgctatttaattggtatctgaattaaaaggtctggtttgtccctagagaatcaaattttttcttcactcccatatttcagaacttgatacatttttaggataaaccatgaatgacacccgtttcttctccctcaccctcccttccctcccattttttttttttttttttagaagctgaataatatcmatgatatcctgaagtccgtgttcttgatcttcccacatttttgcctgggacgagggctcatcgacatggtgaaaaaccaggcaatggctgatgccctggaaaggtttggtgagtgaagcagtggctgtaggatgctttaatggagatggcactctgcataggccttggtaccctgaactttgttttggaaagaagcaggtgactaagcacaggatgttcccccacccccatgcccagtgacagggctcatgccaacacagctggttgtggcatgggttttgtgacacaaccatttgtctgtgtctctgatagcattgagaaaagtgaaagggcagttttgaaggtaaggaaaatagtgkyatttgcttggatccactggctcatgccactgtctgggttggttagaagcactggaaaagtcaaaccataactttgagaattaggtgatcagggaatcagaaggaaagatgcaaactttggctcttttaggcgaatcatgtgcctgcagatgaggtcatttattatcttttacacagtctataaaattataatgtattacatctttttctacctttagaatggttaaaaatatttctccggtagccatatgattattattcatccattagataatatagtcaaatgggccatgttatttactgttcatagaagaggggctttttgcaacttgggctacaaaggagatatgtaaggaatttaaggaatggttacatggaactagatttaattgaatctagtggtttaattgattcactaggatatatgctactgaaaggggaatctgcttaaagtgctttctgatatttattattactaaaacttagaatttattaaaaatactgactgtgaaaattacttgggtcgtttgcctttttaaaaggatttttggcatgtctcattaaaaaaagaaatactagatatcttcagtgaagttacaaatcgaatacacattggctctgaaattctgattgatactgggtcataaaaagttttcccaaatcagacttggaaagtgatcactctcttgttactcttttttccttgtcatgggtgatagccatttgtgtttattggaagatcggtgaattttaaggaacataggcccaaatttgaggaagggccatggtttttgatccctccattctgaccggatctctgcattgtgtctactaggggagaatcgctttgtgtcaccattatcttgggacttggtgggaygaaacctcttcgccatggccgtggaaggggtggtgttcttcctcattactgttctgatccagtacagattcttcatcaggcccaggtgagctttttcttagaacccgtggagcacctggttgagggtcacagaggaggcgcacagggaaacactcaccaatgggggttgcattgaactgaactcaaaatatgtgataaaactgattttcctgatgtgggcatcccgcagcyccctccctgcccatcctggagactgtggcaagtaggttttataatactacgttagagactgaatctttgtcctgaaaaatagtttgaaaggttcatttttcttgttttttcccccaagacctgtaaatgcaaagctatctcctctgaatgatgaagatgaagatgtgaggcgggaaagacagagaattcttgatggtggaggccagaatgacatcttagaaatcaaggagttgacgaaggtgagagagtacaggttacaatagctcatcttcagtttttttcagctttatgtgctgtaacccagcagtttgctgacttgcttaataaaagggcatgtgttcccaaaatgtacatctataccaaggttctgtcaattttattttaaaaacaccatggagacttcttaaagaattcttactgagaattcttttgtgatatgaattcccattctcgaatacattggttttatatgcttacatttatgtgttagttattaaaacatactaatattgtatatctagtcaaaactgaggtagagagaataaatggttgattttgagtttgagtttcatagtccaaaaagctgatatattgcctgtgttcaagagggtctatatcagccctctagatgccagcatctccaaattttacttttttggaatctgtacagtatttgcaatatttttattacaaatttctactctgtggaatttaatttttaaaatacctgcaatacatatatatgttgaatagatgaaaaattatgtagatrataatgaatgatrcggttctaaaaagacaggttaaaaagtaagttcacttttattttgagcttcagaatcattcagaagccagtcgccacaaacgcagaccaaggctcttggcacatyaaatatgcctatggcttagggttattgacaagtcttatgttgcagtgtatgtggtttatagtcctgccttccacagttgcttgggagagctgtgagtcactgaggcttatgaatgtttacattttgtttgttgcagatatayagaaggaagcggaagcctgctgttgacaggatttgcgtgggcattcctcctggtgaggtaaagacactttgtctatattgcrtttgtccctattagttcagactatctctacccaatcaagcaacgatgctcgttaagaggtaaaagtggattttaaaggcttctgtatttatgccaggatggagcaattagtcatcgagaagaragggaccctgtatgtcaagagaatgatttcagagaatccaatacaatttaagaaaaagcatggggctgggcgcagtgattcactcctgtaatcccagcactttgggaggccgaggtgggcggatcacgaggtcaggagattgagaccatcctggccaacatggtgaaaccccatctctactataaatacaaaaattagctgggcatagtagtgcattcctgtagtcccagctactcgggaggctgaggcaggagaattgcttgaacctaggagggggaggttgcccagattgcgctgctgcactccagcctggtgacagagtgagactcatgtcaacaacaaaaacagaaaaagcacgcacatctaaaacatgcttttgtgatccatttgggatggtgatgacattcaaatagttttttaaaaatagattttctcctttctggtttccgtttgtgttcttttatgcccttttgccagagtaggtggtgcaatttggctagctggctttcattactgtttttcacacattaactttggcctcaacytgacaactcaaataatatttataaatacagccacacttaaaatggwcccattrtgaaatacatatttaaatatctatacgatgtgttaaaaccaagaaaatatttgattcttctctgatatttaagaattgaaggtttgaggtagttacgtgttaggggcatttatattcatgtttttagagtttgcttatacaacttaatctttccttttcagtgctttgggctcctgggagttaatggggctggaaaatcatcaactttcaagatgttaacaggagataccactgttaccagaggagatgctttccttaacaaaaataggtgagaaaagaagtggcttgtattttgctgcaaagactttgtttttaatttatttaaagaaataggttgttatttttgattacagtggtatttttagagttcataaaaatgttgaaatatagtaaagggtaaagaagcacataaaatcatccatgatttcaatatctagagataatcacaatttacatttcctttcagtctcattctcttcttttaacagctttattcaggtataatttacatacaatataatttgcttgttttttaagagtataatttagtgatttttggtaaattgagagttttgcaaccatcaccacaatccagttttagaacttttccatcaccccacatctgtcttatatacacatataaatgtgccatacaattgagatcatactgtatgtagaatttaaaattagtttttattgttaatgagtgtattatgaatatttcccagtgggttacatttcctaagatgtggaattttacattgctacataaaatycccctatgtacatgtacctataatttatttaataaattccttataaatgttggacacattagtttccatttttcrctatgtaaatatgtccctgtatacatcttttattatttcctcaggaacaattcctacaaagtaaattgccctctctaaagagcatacaaattgactgagccaccgttaggccattttctgagactgcacaggtcacaaagcaatctgatctttgggaatacagctacattttataggcttcttagataatgttactctaagtactttaaatatgtggggcttctctgggcttttttttttttgagacggagtttcactcttactgcccaggctggagagcaatggcgcgaccttggctcactgcaacctccgcctcccaggttcaagcgattctcctgcctcagcctcctgagtagctgagattacaggtgcccgccacaatgcctgcctaatttttttgtattttcagtagagatggggtttcaccatgttggccagactggtctcgagctcctgacctcaggtgatccacctgcctcagcctcccaaagttctgggattacaggcatgagccactgcgcccggcttctctggacttattatgtggagagatagtacaaggcagtggctttcagagttttttgaccatgaccgttgtgggaaatacattttatatctcaacctagtatgtacacacagacatgtagacacatgtataacctaaagtttcataaagcagtacctactgttactaattgtagtgcactctgctatttcttattctaccttatactgcgtcattaaaaaagtgctggtcatgacccactaaatttatttcccaaaccactaatgaacaatgactcacaatttgaacacactggacagggggatagccaataaaattgaaaagagcaaggaaattaatgtattcatgatctcctctcctgtctcttacatttttgcagtagcaatgtaaaggaatcctaagagaacagacattctgggaatagcaggcctagcgctgcacaactgctttcctaggcttgctcctagtaccaagctcctgacgcatatagcagtggcagtaataaccagcccatagtaaggtttgtcacagggactggttgtaagaactgatttgrttggtatagctgtgagggcctggcacggtgtccacgtgtgcctcaatcctaattctgaaaaaggctgaccctgggggtgctaattagatacacagagaggaatgaatgctgccagaaggccaagttcatggcaatgccgctgtggctgaggtgcagtcatcagtctggaacgtgaacactgaacttctctcacatgtgattcttcacttgactggcttcatagaaccccaaagccaccccaccaccacataaattgtgtctctaggttctgtgttgctcacactcaaaatktctgggccttctcatttggtgcatgtgaatggtgcatatgagtgaagtctaggatggggccttagcrttaaagccctggggtagtgtgactgagattgttggtaaagaatgtgcagtggttggcatgacctcagaaattctgaaatgggactgcacctgcagactgaagtgttcagagagccagggaggtgcaaggactggggagggtagaggcaggaaccctgcctgccaggaagagctagcatcctgggggcagaaaggctgtgctttcaagtagcagcagatgtattggtatctttgtaatggagaagcatactttacaggaacattaggccagattgtctaaccagagtatctctacctgcttaaaatctaagtagttttcttgtcctttgcagtatcttatcaaacatccatgaagtacatcagaacatgggctactgccctcagtttgatgccatcacagagctgttgactgggagagaacacgtggagtyctttgcccttttgagaggagtcccagagaaagaagttggcaaggtactgtgggcacctgaaagccagcctgtctcctttggcatcctgacaatatataccttatggctttyccacacgcattgacttcaggctgtttttcctcatgaatgcagcagcacaaaatgctggttctttgtatctgctttcagggtggaaacctgtaacggtggtggggcagggctgggtgggcagagagggagtgctgctcccaccacacgagtcccttctccctgctttggctcctcaccagttgtcaggttatgattatagaatctagtcctactcagtgaaagaactttcatacaygtatgtgtaggacagcatgataaaattcccaagccagaccaaagtcaaggtgctttttatcactgtaggttggtgagtgggcgattcggaaactgggcctcgtgaagtatggagaaaaatatgctggtaactatagtggaggcaacaaacgcaagctctctacagccatggctttgatcggygggcctcctgtggtgtttctggtgagtataactgtggatggaaaactgttgttctggcctgagtggaaaacatgactgttcaaaagtcctatatgtccagggctgttgtatgattggcttgtcttcccccagggacagcagagcaaccttggaaaagcagagggaagcttctcccttggcacacactggggtggctgtaccatgcctgcagatgctcccaaatagaggcactccaagcactttgtttcttagcgtgattgaggctggatatgtgatttgatctttctctggaacattctttctaatcatctttgtgttcattccctgaaaatgaagagtgtggacacagctttaaaatccccaaggtagcaactaggtcatagttccttacacacggatagatgaaaaacagatcagactgggaagtggcccttgaccttttttcttctgtagataagagcattgatgttattacgggaagaagcctttgaggcttttatgtattccacctcggtctggaatttgtttctgtaaggctaacagttgcaatatactagggtaatctgagtgagctggaattaaaaaaaaaaaggaatttcaccccaatcttatactgacttcaatagagstttcagacaaaaagttgttttgtatatacttatcagtcatgaaaagataattacaactaaatggcctttttccttccctatttatytggagaaatttaattacataaaaaagtactcagaatatttgagtttcctgcatcaataagacatttataataatgaccttgtttacaaatgaatttgaaagttactctaattctttgattcatcaagaaataactagaatggcaagttaaaatttaagctgtttcaaagatgcttctgcatttaaaaacaaatttatctttgattttttttccccycagcaaataagacttattttattctaattacaggatgaacccaccacaggcatggatcccaaagcccggcggttcttgtggaattgtgccctaagtgttgtcaaggaggggagatcagtagtgcttacatctcataggtccgtagtaaagtcttgggttcctcactgtgggatgttttaactttccaagtagaatatgcgatcattttgtaaaaattagaaaatacagaaaagcaaagagtaaaacaattattacctgaaattatatatgcatattcttacaaaaatgcaagcccagtataaatactgctctttttcacttaatatattgtaaacattattccaagtcagtgcatttaggtgtcatttcttatagctggatagtattccattaggatatactcttatttaactattcccccttttgtagacatttggattatttccaacttgttcacaattgtaaacaccactacactgaacagcatcatccctatatccacatgtacttgtaacagaatacaattccctaggaagctggaatgctggaagtcatggtgatgttctcatggttacagagaatctctctaaaactaaaacctctttctgttttaccgcagtatggaagaatgtgaagctctttgcactaggatggcaatcatggtcaatggaaggttcaggtgccttggcagtgtccagcatctaaaaaataggtaataaagatartttctttgggatagtgcctagtgagaaggcttgatatttattcttttgtgagtatataaatggtgcctctaamataaagggaaataaaactgagcaaaacagtrtagtggaaagaatgagggctttgaagtccgaactgcattcaaattctgtctttaccatttactggttctgtgactcttgggcaagtkacttaactactgtaagagttagtttccctggaagatctacctcctagctttgtgctatagatgaaatgaaaaaaatttacatgtgccagtactggtgagagcgcaagctttggagtcaaacacaaatgggtttgcatcctggccctaccaattatgagctctgagccatgggcaagtgactaactccctgggcctcagtttctctgtaacatctgtcagacttcatgggtccaggtgaggattaaaggagatcatgtatttacagcacatggcatggtgcttcacataaaataagtatttagtaaatgataactggttccttctctcagaaacttatttctgggcctgccaggggccgccctttttcatggcacaagttgggttcccagggttcagtattcttttaaatagttttctggagatcctccatttgggtattttttcctgctttcaggtttggagatggttatacaatagttgtacgaatagcagggtccaaccyrgacctgaagcctgtccaggatttctttggacttgcatttcctggaagtgttctaaaagagaaacaccggaacatgctacaataccagcttccatcttcattatcttctctggccaggatattcagcatcctctcccagagcaaaaagcgactccacatagaagactactctgtttctcagacaacacttgaccaagtaagctttgagtgtcaaaacagatttacttctcagggtgtggattcctgccccsacactcccgcccataggtccaagagcagtttgtatcttgaattggtgcttgaattcctgatctactattcctagctatgctttttactaaacctctctgaacctgaaaagggagatgatgcctatgtactctataggattattgtgagaatttactgtaataataaccataaaaactaccatttagtgagcacctaccatgggccaggcattttacttggtgcctaatcctatttaaattagataaaaaagtaccaaataggtcctgacacttaagaagtactcagtaaatattttcttccctcttccctttaatcaagaccgtatgtgccaaagtaaatggatgactgagcagttggtgatgtaggggtggggggcgatatagaaagtcartttttggccgggcgtggtggctcatgcctgtaatcccagcactttgggaggctgaggagcaggcagatcatgaggtcaggagatccagataatcctggccaacagggtgaaaccccgtctctactaaaaatacaaaaattagctgggcatggtggtgcgcacttgtagtcccagctacttgcgaggctgaggcaggagaattgctygaacccaggaggtggaggttacagtgagccaaggtctcgccactgcactccagcctggggacagagcaagaccccatttcaaggggggaaaaaaagtctatttttaagttgttattgcttttytcaagtattcttccctccttcacacacagttttctagttaatccatttatgtaattctgtatgctcctacttgacctaatttcaacatctggaaaaatagaactagaataaagaatgagcaagttgagtggtatttataaaggtccatcttaatcttttaacaggtatttgtgaactttgccaaggaccaaagtgatgatgaccacttaaaagacctctcattacacaaaaaccagacagtagtggamgttgcagttctcacatcttttctacaggatgagaaagtgaaagaaagctatgtatgaagaatcctgttcatacggggtggctgaaagtaaagaggaactagactttcctttgcaccatgtgaagtgttgtggagaaaagagccagaagttgatgtgggaagaagtaaactggatactgtactgatactattcaatgcaatgcaattcaatgcaatgaaaacaaaattccattacaggggcagtgcctttgtagcctatgtcttgtatggctctcaagtgaaagacttgaatttagttttttacctatacctatgtgaaactctattatggaacccaatggacatatgggtttgaactcacacttttttttttttttttgttcctgtgtattctcattggggttgcaacaataattcatcaagtaatcatggccagcgattattgatcaaaatcaaaaggtaatgcacatcctcattcactaagccatgccatgcccaggagactggtttcccggtgacacatccattgctggcaatgagtgtgccagagttattagtgccaagtttttcagaaagtttgaagcaccatggtgtgtcatgctcacttttgtgaaagctgctctgctcagagtctatcaacattgaatatcagttgacagaatggtgccatgcgtggctaacatcctgctttgattccctctgataagctgttctggtggcagtaacatgcaacaaaaatgtgggtgtctccaggcacgggaaacttggttccattgttatattgtcctatgcttcgagccatgggtctacagggtcatccttatgagactcttaaatatacttagatcctggtaagaggcaaagaatcaacagccaaactgctggggctgcaagctgctgaagccagggcatgggattaaagagattgtgcgttcaaacctagggaagcctgtgcccatttgtcctgactgtctgctaacatggtacactgcatctcaagatgtttatctgacacaagtgtattatttctggctttttgaattaatctagaaaatgaaaagatggagttgtattttgacaaaaatgtttgtactttttaatgttatttggaattttaagttctatcagtgacttctgaatccttagaatggcctctttgtagaaccctgtggtatagaggagtatggccactgccccactatttttattttcttatgtaagtttgcatatcagtcatgactagtgcctagaaagcaatgtgatggtcaggatctcatgacattatatttgagtttctttcagatcatttaggatactcttaatctcacttcatcaatcaaatattttttgagtgtatgctgtagctgaaagagtatgtacgtacgtataagactagagagatattaagtctcagtacacttcctgtgccatgttattcagctcactggtttacaaatataggttgtcttgtggttgtaggagcccactgtaacaatactgggcagcctttttttttttttttttaattgcaacaatgcaaaagccaagaaagtataagggtcacaagtctaaacaatgaattcttcaacagggaaaacagctagcttgaaaacttgctgaaaaacacaacttgtgtttatggcatttagtaccttcaaataattggctttgcagatattggataccccattaaatctgacagtctcaaatttttcatctcttcaatcactagtcaagaaaaatataaaaacaacaaatacttccatatggagcatttttcagagttttctaacccagtcttatttttctagtcagtaaacatttgtaaaaatactgtttcactaatacttactgttaactgtcttgagagaaaagaaaaatatgagagaactattgtttggggaagttcaagtgatctttcaatatcattactaacttcttccactttttccaraatttgaatattaacgctaaaggtgtaagacttcagatttcaaattaatctttctatattttttaaatttacagaatattatataacccactgctgaaaaagaaaaaaatgattgttttagaagttaaagtcaatattgattttaaatataagtaatgaaggcatatttccaataactagtgatatggcatcgttgcattttacagtatcttcaaaaatacagaatttatagaataatttctcctcatttaatatttttcaaaatcaaagttatggtttcctcattttactaaaatcgtattctaattcttcattatagtaaatctatgagcaactccttacttcggttcctctgatttcaaggccatattttaaaaaatcaaaaggcactgtgaactattttgaagaaaacacaacattttaatacagattgaaaggacctcttctgaagctagaaacaatctatagttatacatcttcattaatactgtgttaccttttaaaatagtaattttttacattttcctgtgtaaacctaattgtggtagaaatttttaccaactctatactcaatcaagcaaaatttctgtatattccctgtggaatgtacctatgtgagtttcagaaattctcaaaatacgtgttcaaaaatttctgcttttgcatctttgggacacctcagaaaacttattaacaactgtgaatatgagaaatacagaagaaaataataagccctctatacataaatgcccagcacaattcattgttaaaaaacaaccaaacctcacactactgtatttcattatctgtactgaaagcaaatgctttgtgactattaaatgttgcacatcattcattcactgtatagtaatcattgactaaagccatttgtctgtgttttcttcttgtggttgtatatatcaggtaaaatattttccaaagagccatgtgtcatgtaatactgaaccactttgatattgagacattaatttgtacccttgttattatctactagtaataatgtaatactgtagaaatattgctctaattcttttcaaaattgttgcatcccccttagaatgtttctatttccataaggatttaggtatgctattatcccttcttataccctaagatgaagctgtttttgtgctctttgttcatcattggccctcattccaagcactttacgctgtctgtaatgggatctatttttgcactggaatatctgagaattgcaaaactagacaaaagtttcacaacagatttytaagttaaatcattttcattaaaaggaaaaaagaaaaaaaattttgtatgtcaataactttatatgaagtattaaaatgcatatttctatgttgtaatataatgagtcacaaaataaagctgtgacagttctgttggtctacagaaatttacttttgtgcatttgtggcaccacctactgttgaagggttataaagccattagaaaagtagaggggaagtgatttggatcaaaaggaaaaactttagaaaagattcaaatgttcccttaatcataaaagagaactgaggggactacttgaaaataaaaggttgttttgtattttcatgttggttaagatactgagtaactggtattaagtgttagaggtttttagataaatattctgcttaatgattatgaagctgcactgagatttctgaaaatgctctgtagctgagcttatttaataaatgttcacttggtataggggaagctacaaaggcagccttcagtgtccttttgtttattcaaccaaaaatataaggacacaatgtagcagttatactgggaaggtgctgggggtggtggcaatggtgagcaggaaggcgaagtagatatggaaacagaaatgatactaatatcggtgattccttccttttttcctgtaataagtgctgtgcagacaacatatgagcagtgctgataaatgtaaatgtatttttcatagctcattaagaatcagtttcagaaagagatgtctgcttattttgctacttgaagaatccctgtcaaacagtccttttgaggaagtacaagaggctgtctctatttgtgacctcaggaatggctgtgacagtgtcgtgagcagtccttttcctgtggcacagatctgaactttgtgtgcagaaaaatcttggcttcaagtgagccaagatgccccctgagcatcagcatcacaacttcatcctcctatcttgaagttcatgttatagtgactttaatgaaatcatagaacactgtttcttcgtgaacaatgacgagggagaggaaaaaactttattgaaaaataaaaaggcaggtaatttagatgaaaatatgttacccatgaggttttgtttttgctttttgtttttgtttttgagaaacagaatctcgctctgtcgtccaggctggagtgcagcggcatgatcttggctcactgcaacctccgcctcccgggttcaagcgattctcctcagcttcccaagtagctggtactacaggcatgcgccaccacaaccagctaatttttgtatttttagtagagatggggtttcactatacgttggccaggctggtctcaaactcctgacctaaggtgatccttctgccttgggctcccaaagtgctgggattacaggcatgagccaccttgcctggccctacccatgagccttgactaaaacattcttctatctgtagaaaagcccaaaagaacttttccagattcaaaaaacttggcactttgtaatggtaatgtttacattaagtaaaaaaaaaaaaaaaacccacttagcttcagttttcaagtgtttactgtgttgtcatgcacttcatttaattctcaacacctgccctatgaggtaaaaagtaccattttacatatgagtaaattacagctcagtggataagaaactcgtccaaaggtacaggttcagtcaagtggcagagggttctttttgttgaagttaggtatcagttaaaattgaccttgtaaaatcacatcagcatcaatatacattaatttaacaaatatttattgaactttactgtatgccagatacttctctaggtactagggggtacaatgtagaagaaaatagaattcctgctctaatgaatttatatttcagtggtgaaagatgatgtgtggacaaacacatctaatgtattttgacagcaatgggtgctaagaagaaaataagacatggtaattggataacaatggagagaagtcagagatggccttttctgaggagtgacatgctcagaatcgaataaaaagagcaggagcagcctttcaaggtgggtgcgaaggatattcccggaagaaagaataagtgttgcaaaagccccagtgggaaaaagcttggcaagctgaggtggtaaaagagctatctgtactaatgtctcttgtactgagttagcaaggacaagagtggcagggggtggaactggagagatagcagggaccacatctcacaggatctcgccagcctttttaaggtatttggattttattgttagtgcaacaaggagccactggagagttttaaacagtagtggtgtgacctactgtttcagaaagaacactggctactatgggaagaaaggacagtaggaagactaatagataatggtggattgaactaagatggtagcaacagatagggagctatggtaatgttcagtatccactttggagatagatccagcaggacttgctgacagactgcatgtaagggctgagggaaagagagctagcaaggtgacttctagtttgtgacctgaactaggtagatggttgtgttaaaaatgcagtgggtatttcagtctgaagctcaggggcaatgatggaaaataagataaatgtgtgcaagytggctgggcgtggtggtgcacgcctataatcacagcactttgggaggccgagacgggtggatcacttgaggtcaggcgtttgcgaccagcctaacatggtgaaaccccatctctaataaatacaaaaaaattagctgggcatggtggtgcatgcctgtaatccaagctacttgggaggctgagacaagagaatcgcttgcacctgggaggcggaggtttcagtgagctgagatcgcaccattgcactccagcctgggcaacaagagcgaaactccatctaaaaaaaaaagtgtgcaagttattggtacgtatatatttaagcctcgggactgaatgagattacctagagagaatgaagatagggaacattcttgagcctgagatcctataacatttagaagagaagctagccagggaaattgagagggactggccagtgagagagagtaaaatctgaagagtataatgccatatgttgaagctcagagaattattgtttcaggaaggcagaagttgtcaattatatccaacattgctgagaagatgagtaaggaatgtaaatgagtaaaggcaggaatggctattgaatttgttaagacagaggtccttggtgaccttcmtaagagtcatttcagcatgacaaggatgcagacctaactggaatagattttcagggaagactgagaggcaaggaaggggagactgcaaatatatgcaaatctatatttttgctttgaagggaaacagaaaacaggacaacagctggtttacagaacttttatttggattctttccttgtctgttaataatataggctgcacctgggcatcatcgtgcccttcctttttgattctgctgttttgcttttaatcctacaggcatttcttctggcaggagccttgtacacactctgggtggttcatgaccaccacggacttgccctttcaaggcagaagcctgtgattcaaaaacttccattccttccaatcgactattataaaactcattttgtctagtgcccatactcctttaccttaggatcctgggccaactgtcactaaagaaaacaaaccatttcctcctcctgggggaatgtgcttctttcaagaaggtgcttagagaatagacattctaggtgacagcagttatgaaagaggtgtctctaatgaacctaacacttcttccaacatactccaggttcaccctcctttgaagacagaaagtactacaacttcagttgccaccctagtcaggttcataggatttactcagtaggttaagagatggtgctgagaatgaagtccagagtttgagtctacaagtggcatttgcttctcctttgggacttctgtggcagggtgtggaaccaaatcagattggttgcatatctgtttctcttcctgaaaatacaattcaaataccttcatagtctgtgacagcaacttataaccaacagacaatggtattatttttatttattgatggcactcccccatagccagaacttctactgagtcattcatcgtgtattccaggaatactttccaaatggagtagtgaggcacttccaataacagttatgtaatctgttaacagtggctcaaaatgacatgtgaaggaatgatgtacttcttttttcagactcacagatctcatatgttaattcagtcaacaagtacttagggcttatcacatgccaggcacaggtaatatgacaataatgaaaacaaaaacccttgctgtcatagaattcggtttctagtgggaagagacatacattaacaaatcatatataagtaaaacattaattatggtgataacagaaaaagaaagcaggggagagggatagtgtcttagttcaggttgctgtaacaagagtaccatagacagggtggcttaaacaacaaacatttctttctcacagatctagtggctgggaagtctaagaccagggtgccagcatgaagaagttctggtgaaggcttacattctggtttcctcacagtgagggctcttcacgcccttataaatgcactaattctattacccacatgacctcatctaaaactaactcacaaaggccaaacctcctatgttgagattaaggcttcaacataggaattttgggggggacaaaaacattcagtctctagcagataggggccactgtgggaggggattacaatcttaaatagggttgtcagggaaggcttcatgagggcaaagacctgaggaggcatggaaatgatccacgcagatgcatgtctggggaagagcattccaggcagaggcagtgggaatggaccctcaggtaagagcatgtttagcaagttcagagaaaagcctcttaggtcaggtctggagcgagagtggaaaatgtaacaggacagatcatgtaaagacttgtagaccacagttagaggcttggacaataactctgaggatgacatgaaggtattgggagggggtgttgagcagaggagtgatatgatctggtttatattttagattattctgactgctatgttgaaaatagggttgagagcagaggggaagggcagcacaccagttaagaccacttcccaaaaatccagatgatgatgggcttgaaccaggagagttgctatagggatgtgaagcaatcaaattctagatatttgggacctgctgacaggtacataatggtgtatgagagaaaaggcagtgtgagaatgactctgaagtctgtggcctgagcaaaacagaaacctggagttgccaatagctgagataaagtttctggttaaagatcaagagctcagttttggacaagaggggtgtgagatttctaatagacattcaggtggaggtgtggggaacacacctggatgtgatgagcctggaattcaaattcacatgtgtgaatttgaaaaaagattcagaaaagaggtgtggactggaggagctatccacacacagatagcatttgaagccacaagactgggggtgatgacgcagggagtaagtataaatagaaaagagaagtggtccaaggactcagtccttacatcagaggtcaaagagacaagatggagactaggagatatgaaggcttgtgcagtgagtgtttcggagaaacgaagaaactttccagaagaaaggagaggtcaactgctaacaagtcaagtgaaatgagaactgggaaatgagttgacaagagcaatttggctggcgtgatcagagaatgtttaagagataatgtgagggaagaaaatggaggcaggaagtatgaactactcttttgagtcatattgtaaaggaaaaaaatggggtgattttactcttttttttttttaaagataggaaaaaaaagtatatttatatgctgaggagaagaatccagttgaaggggaatactgtggcttcaggagacaggaaaactgcctaagccacatccttcagcaagtgagtgttcaagtggagggtttgtctttgcttggggcacgggcggttcatccacagtgaaaggagagaaggca

SEQ ID NO: 8713 - DNA, 16269 bp, Homo sapiens
tccgtagcatcaggcactatctcctcaatgccagctgctgtgctagggcagagggtgatctctggccacacccctgagtctgctgttccctttccagggagcccactgttcctggggcctccccagattgatgtctggagtggaacaggccacccaagtgagatcctcgggctcagccctagccttttcagctccccagggaaactgctgccagacgagatcttggaggatgacatggagtacctgacccaaggtgaggcccaggcctggccctgatgcttagttcattcgggaaacatacggtgcccaggcctgcgctgggccatcctgggtgcccggggtgaatcctgccctggccctgcctcaaggagcccacggcctagtgggggagcagccacaggctggtgtggtgcatgggtggctttagaagcccatagcaggacttgagctcactctgtgtgttggaggtgacccaggggagtgggctgtgagcgggatttggacctagggtgggagatcctgaaggagaacgccagagacggggactccggctagcagggacggtgtggctgaagctgggcggtgtgggagaagcatttccactctggctgcccctctggtctccctccctagcggctttctttgaagaagtgtgcttagatctggagtcttcaccttcagcctacacgcaggaggctccacaggaaaaggtagacatcctctgcccctctgtccacagacacatccatccgtctttccacacacgtcactcatggcttcattcactcatccactccctcaccctttcagccaccatctacccatctgtccttccactcatgcgtctcctcatccttaaaaccgccccccgaccctctctgcgctcactggtggccaccagatgccggctctgtgctgggcacgtggaacgaattggacaaaatggataaaaaaggataaaagctgccaggtgcccatagaaaagaaaactcacatcattttattcatttattttattttattttattttatttagactgagtttccctgttgtcgcccaggctggggtgcagtggtgcgatctcggctcactgtaacctccgcctcccgggttcaaacaattctcctgcctcagcccccctagtagctgggattacaggtgcctgtcaccacacccggctaattgtgtatttttagtagagatgggggttcaccatgttggccaggctggtctccaactcctgacctcgagtgatccgcccaccttggcctcctagagtgctgggattacaggtgtgagccaccgtgcccagcttcccacatcattttacaactactctacgaagcagggtctcctgtggccccattttacagataaggaaattgaaatcaaaagactaagctgggcgcggtggctcacacctgtaatctcagcagtttgagaggctgacgtaggcggatcacctgagatcaggagttcaagaccagcctggccaacatggggaaaccccatttctactaaaaatacaagaagtgtccgggcgtggtggctcacgcctgtaatcccactattttgggaggccgaggagggcagatcacctgaggtcaggagttggagaccaaccagtctggccatcatggcgaaatactatctctactaaaaatacaaaattagccgggtgtggtggtacgtgcctgtaatcccagctactcaggaggctgaggcagaagaatcgcttaaacctgggaggcgggggttgcagtaagccaagatggcaccgttggactgcagcctgggcaacaagagcgaaacccagtctcaaaaaaggaaaagaaaaagaaaaagaaattatcagggtgtggccgggcgtggtggctcatgcctatacttctagcactttgggaggctgaggcgggcagatcacctgaggtcaggagtttaaacctagcttgaccaatatgatgaaaccccctctctactaaaaatacaaaattagctgggcgtggtggtgggcacttgtaaccccagttactcaggagtctgaggcaggagaatcacttgaacccaagaggtggagaatggagctgagatggtgccattgcactccagcctgagggacaagagtaagactccgtctcaaaaaaaaaaaaaagaaagaaaagaaaaaaaagaaaagaaaggaagaaagaaagaaagacagggtcttgctttgttgcccaggctggagtgcagtgtcaccatcatagatcagtgccttgaactcctgggctcaaatgaccctcccacaccaccatgcccagctggttttttaaattatttttaaatttaacttaattcaatttctttttttttttttgagacagagtctcactctgtcacccaggctggagtgcagtggtacgatctcggctcactgcaacctccgcctcctggatttaagcgattcttgtgcctcagcctccagagtagctgggactacaggcgcccaccaacatacctggctaattttttagtatttttagacagagtttcgccatgttggccaggctggttttgaactcctgacctcaggtgatcctcctgcctcagcctccgaaagtgctgagattacaggcatgagccactgcgcctggcctatttttttttttttttttttttttttttgtagaacaaggtctctctatgttgcccaggctggtctgtaactcctggcctcaagcagtcctcctgcctcagcctcccagagtgttggggttacaggcgtaagccaccacaccctgccaatctgagctgctgctaatgctcatgttatgtcctagaaaagcagtactggggggatgaaggggcaccacttgtctcccctcccatctttctccctcatcatgccccaggacacagcctccaaggcccccaaagaccctcctgagtcccacagcctgcaccggtcctcagtctcgctggaccactgctacctctcgctgagcgggaacagcaaggcgccatccagctccagctccagctccagctccagctccagctcggaggacagcgactcggagcccctgtggaagcagcgagaggtgagagacacggccgcatgccagggccagcagggcctccttcctctctcaccaccctctccctcccccaggatatgcaggccaaccctgtgggcacgccgggctccagcgaagaggacgaagacaccacatggacccccacccggctggcctcacccctgctggcagctgagaaaaaggccacgaagggccaagtagccagggcccctgtgaagcccaaggagaagaagaaaggcccctgcccaccccagatgaagaagaagtgtgtcaacggcttcatcatgttctgcaggatgaaccggaagcagtacatccggtgggtagggggtcgtctttggccctggggaaggccctggcttcgttctctgcccgcagcctggccatgccgctcctcacaactgtctgacactttttccccctccgagaccccacaaacccttcgtggaccacagttcttccccagaactgaacccggccccattgtattggacagggtccatccattgtcagcgctgaaacccaattcaggctttagacttcagaaaaaaaggagttttttttgttttgttttgttttttgagacagagtctcactctattgcccaggctgtagtgcagtggcacaatcacagctcactgcaatgtctgcctcccgggctcaaatcactgcaacctctgcctctcagattctcctgcctcagcctcctgagtagctgggataacaggcgcgccatcagctaatttttgtatttttagtagagacagggtttcaccatgttggccaggctggtctcgaatgcctcacctcaagtgatctgcctgcctcggcctctcaaattgctgggattacaggtgtgagccatcaggcccagcaagaaaagaaaatgaattggcttatataacctagaaaacaagggcgggtatagactgccttgagacatagctggttttagggctcacacaggctgtctggaatctttgtccttttcacccagttcctctgtcttccgggctggcttcattctctggcaggtggggtcaccccaggaggcacaggctcgggtcctgtcccccacccaagcgaccccgggaggaggagaggtctctaaggttttaagcaaagtccttgggactgactttggtagatccggtgccaaccctgaaccagtcactgccaggcctggagccaggggatggggaggccccccccaagccacagtggaaaacagctagttcctttacaggaagatccagatgtgggggccaggagcggtgcccacaggtcccctgcactctcctgggacaccaggtgcccccttgtgaacagccgctgagtccagctccctctgcctcctcagctccagagggtggtcttggaggccttgtagacccacaaggctaggaagggtctgagttctcagtcagggtgtcctgcagacctctccttacctcctcctccttcctgtcccagatcctgccctggaaccgcttccacagctgccaccaaggagctggcccagctgtggcgggtgatgacccagcaggagcggaggccatactggtgagaggctccggccccgaggtgtgggtggggggtggaagagcctccctaccccggaaccctgctctgtctctggagccttgggtgtcatggcatgggagactgggccgaggaatttgcgtgttgccccttcttatgaaacccttgggggtgacacaggtgtaggggtaccccaccacagctaagctggggaacagctgagcccagacatggacccctgcctcaattcttttgctgtctctgccacacgactttctcggggcgtggtctgattttcctgtcgcttggccacctcgactcccccgaatcctgtcccctccaccttcaaggagctgccacctgccctggctcctgactttgaacacatcccagagcccttggccgagtcccatcttactgactgggacttggtggacccaaggctcgcccaatagaggctaaaacggtggcccaggcccctgcggggacacaggattgggagtggtacagggatgcccgggaggcgagtgaggaagccaggccatcctgccaccgtctccccagcaccaaggctcgcaggttcagccgccagcacaaccgcatcgtgaagcaggacggctccagcagcgaggctgaggactgggagacgccaaagcccttctaccagctgctggccgagaaggccttgccgctgcccccgcacctccagtgagagggcggcccctcgcctcgctcccctcacccctcatggcaaccgcggctcttgctggaagccaggacccatcgatgaacttgtccctcctgggcctccagcccctgagaatgcaggtcccatgggactggggaggggggcactgattagccccaactgctgggcacatttgcctggagcaccagagtcacccacagctgccttgattctcccccaggcttaggaaggaaacccaaaatgaaatgcggggtgtcggaaggtgaagtttacccacccctctccccttcccttccccaccccagagccactcggttgcaaccctgttcatgctcacctcaccctactcctccctctcctgttctatttttagactatttattgttttaaataaaataaagcaagtggaacctttgttaccagcaagagagacaagggcaggccctcctgcgtccccctgctgccccactggggtgctccgtccaccctcatctggaggcctgtggcttgcaagaggcctcagtgccaccccctccccagccactctgtgcatctgaatgcaaacccctcttcccctcgggaggcagcaatgggaaggccaggtctcgaggtgggctctgtgttcagcgctgctttggacagacactggaaggcaccccagacccctggtggtggtgtaatccgataactttattttaattgaaaatggaggcataacatgtcctagaaaaataaagatttaggatacaaaggagacacagcggcagggctgcccccagggatgagggaatctttggtctgggccggataatgaggacaagggcttgagtcgaggggagctggtgaaggaagacccccgtctccccacagctgccccaccccccgcccctggcaggaaatgccacactggggagggtctccagtctcaggggcgcggggctgcctgtcctccaccttcggattccaggcagttgtgacaacaccagctatcggcagagctattaatagtgtttcagggagtgacagggagagggctctgggggctggaagtccggccctggggcagggtgttccgcttacagctagtaccaagtggagggggcagggcccctgagtcaggaccctgagtcccccacgtatatggcagggcacagcatggggagggctgtaacagagaggcctcccatccaaagggggatggagacctggacaggaggtggccggggatacaacccccagcaccaccagggcttggagaggccacccaggcagaaggatgtggtgactggggtcttcagcaaccgcatttctggggctcccccctcccattcctgtccctgyrtcttcagcaccaatgtcgggagaggccacggggccacactgggtcacagttccaagggctcctccacaggcaccgactggagctgggtcagaaccttggcctcagcttccaacccctcgtcaacctcaccccctgcggtggcccccaggagcagcccctcagggtcggggtctggcagcctcagcayggtgtggggggcctgtgtccccagccccttttccgcttccagcagcccctctgttcctgcgcttagttccagccctgctgaccagacaggcacggccgcgggtgacaacatcagcccctctggtgggggcgccgggaagttgggcaggaggccaggggagtcaggggagaaggrcaggctggtgctggaggtggtggcagcggcggggggtggctgctgtgcagaaagggtgcctagggcgtgagcctctgggagagcagggctgggggccaccgggaggcctccctcaggcacggagatggccgtctctggcttcagtggcagggccaggccgggggctggcggcaggacctgggagacgagcatgctggtggggaaggtggcggtgaggatgatcttgccctgctgcasggccacacccgtcacgatggggctgccagacacagggttggccaggaggaagtttcctgtggggagagagggaccgagcgcaggtgagagccaggagagcaggccaagccagagagaagtggagactgtgcagctggagggcgggcggagggagccttgtggtgggccttggggcactgggacttgccagggatgagatgccctccaggagcccagggacagcccctccctctccgagatgactgcacccctccccggctctcacctaggcctgagggagggagatgggggtacctggggcagtggccgaaggcagctgcagggcagtcacgcccaccccggagttgatgaggtgcacattggcagggcctgctgcagctgccaccttcacagggctgcctggcccggctgccaacagctgcaggggccccacagcctggggcagggtcaccacctgtgaggtgggtactacctggggcaggttcaatagtggggaggtggggctcaggcccgtgggataccccgggggtggggagagcggtaccacttgtggggcagccacagcaggcactggccccgggggcagaggaaaggtggcagccgtcggggggccaggcaccacttgggccaggggccccaggacctcctctccaagggctggtcccggagcagccacctgggcccctttggtctcaggggcctccgactgagcctcctccagccgcacctcccctgtctgagggtccaggaccagagaggtcttggtctcgctggccccctgagggctgggctgcggtggaggggcacccccgcccccagtgagcagcagcgggcccaggctggaggcctcgcccagggccaggccgttgatgatgacggggcccccgttgaggagcactgctggggagccgctggctgccaggaagctcccgttcaccaggatggaggaggaagccgggcaaggcgcgggagggccggtccctgccaggaatatggagccctgggcagcggcctcggcggacactggggccgcccctctctccaggtcctcaggacttcggctggactcgtcctcagtcgtgggattcccatcagactcgctggccggagaaatggctgtcagctggggtcccttagcctgtggggcctcccgcatagccagccagctgctcccccacctttccctggcccaagtttcggtggatcattccaggggttatgacgcctctctgagaccactccaaactccagggccttttgcaagccctgcgtggacaccactgcagagaagcgctggggagggaagaggcccttgctctcccccacctcggcctcgggtccccagaggctgagctcccaggttgccctaaaagttccttggttgggcggaaagcgggcgagtggcctggagagagggagcagcagccgccagcccagttcccggtgccctccccgcggggcgtcagagaagggagaggccggcgctcagggtgggaggagaagggtttgggttacagggaaaccggagctgggaaaggttcacgtttcacaacaaaggcagaagacggaccacgccgtccgggcccggagggagtgtgggggcgggtgggtaagagtaacggtcagtgaagaaagggggctgggaggcagcccctacgcggagtggagtggccacaggccctgtcctttttcctcagtccctctagtgccccccgcagtgtgattccccaacaccgatgggatttgggaaggagctcggaatggagccgctggaagaggagacgcgtgcggggagagggcccgggcgggtgcctgtcccgtccacacttagtccccgcgccccgcgggcgcctgagattgtgakctggtcccgggagatgtccgaggacctcggcgcgccggccccagcagtgggcacgggggragagggctggtggacgggatgtccccgggagagctggacttgcgccgcccgaggcccctcacctcttgcagggcgcgccgcctccggccccggtccggtcgcgctgtcgccggttcttgaaccagttgctgacctgcgtgagcgacaggccggtgagtgtggccaggcggcgcttctcgtccggcgtggggtagcggttgccgcggtagcaggccttgagcgctgcgcgggagcgctccttgaagcagtagactgtctcctcgccgtcccagatggtcttgggcagcgggaacttcttgcgcagtcgatacttgtccactgcgccaagcgcgcggccgcgggcccgctcggcctcatggtagcgcgcgcgcaggtagaggtcctgcaggaaggcgtggtgggcggcggggaaggggcggctctcgagtagccggtagagctcggcgtactcgccccgctggaaggccaccagggcccgcgcgcgcaacaccgggtcgctgccacgtaggcgctcggccgggggcagtgcgcccaggaagcggctcaagcggccggcgtggcccgcctggagcagcgcctcgcagacgcacgccacctgctcgggcgagaagcggaggcccgtgggcggttcggaagcggcctcggggggcgacccggggacgcccggggatcccgggccctcagctcccgcagccgctgcgcccgccccggccccggccgccgccgccgcctcaccctcggccgcctgcaaagtctgcaagagctggcgcgcttcctcctcctcctcttcggtcgccgccgccgccgccaccgcctcccccccagccgccggccccgcgctcggctccgcaggcaaggtagccatgttttgcaactttgggaagttcctccctccctctcttcctccctcgggctttccccagcctcctcccccacctgtccccccttttcgcccccactccccgctcttctcgatcttctttctggccgaccctgcgccccacgccgggaaggcgagatccagctctccactcgggtctctgtccccttgtgtgtgtccgtccccctcccgtctgtctgtgattctccctttgttttccctccgcctctggccgcgctttctgcctccccccagcgtgtgcttctggctcagggcctcagtttccccatcgggacaacgcagaaggtaacgggccgtccaggaggactaagggcgcgaagcctccgccccgagactgagcttctgcacgcctccgtctccagggtcctctgcaggcccccacattccccatctcggcctgcgctccgcccctcggaattcccggctccgcagggggggcgggtctggccgggaggaggggcggggaacgggctagaaagtttgcagcaacttttctcgagcttgcgtcccaggagcggatgcgcgtggcgtgcgcaggcgcagtggaaggaggatggccgcgcgcgctgccagcccagccccctcttctcgacgctcggtggcacagctgggccacagctgggcgggggcggtgcctccgggtggcccgctcgccctcctattggccggacgccaaagccccgccccgtggcttttcctcccccaaccctgattcggccgcttcgcatcccgctagctcctcccagaccttcggccgcctccacacgcctccggattggcccgctgcggagcctccggcccacaacgcaaaccgcggacactgtggagtccagagctttgggcagatggagggccttttattcgcgagggtcgggggtgggggtcctaggtggggacagacaataaataccgaggaatgtcggggtctcagtgcatccaaaacgtggattggggttgttgggggtcctgtagcctgtcagcgagtcggaggacgaggtcaataaatatccaaaccgccgaagcgggcggagccggctggggctccgagagcagcgcaagtgaggaggggggcgcgggatccccgaaaaagcgggtttggcaaaagcaaatttcccgagtaagcaggcagagatcgcgccagacgctccccagagcagggcgtcatgcacaagaaagctttgcactttgcgaaccaacgataggtgggggtgcgtggaggatggaacacggacggcccggcttgctgccttcccaggcctgcagtttgcccatccacgtcagggcctcagcctggccgaaagaaagaaatggtctgtgatccccccagcagcagcagcagcagcagcagcagcagcagcattcccggctacaaggacccttcgagccccgttcgccggccgcggacccggcccctccctccccggccgctagggggcgggcccggatcacaggactggagctgggcggagacccacgctcggagcggttgtgaactggcaggcggtgggcgcggcttctgtgccgtgccccgggcactcagtcttccaacggggccccggagtcgaagacagttctagggttcagggagcgcgggcggctcctgggcggcgccagactgcggtgagttggccggcgtgggccaccaacccaatgcagcccagggcggcggcacgagacagaacaacggcgaacaggagcagggaaagcgcctccgataggccaggcctagggacctgcggggagagggcgaggtcaacacccggcatgggcctctgattggctcctgggactcgccccgcctacgcccataggtgggcccgcactcttccctgcgccccgcccccgccccaacagcctacagctgttgttagtccactcgcacgcctcgaatcccgtccgaactcgtcattggctgcttcctagcggcctgtgttgattggctgcccgaagatccgccctcctgccgtgggcccagccccgcaaatgcgcagctaagcgggtggcaaggggcgggtggagcgcggggcgcgacggcggaggggggcgtgggcagccggacgtaccctggcagggagcagcaggtggcggcggtgcatggggcctggccccaccagcgggcactggcccacagccacggccggggggccatctagctggagagagaagggacaggtgacccgatcggagcccagcccagccctcagcggtggggcgagagacagcgaggggaatcgaggttggggaggttatctagggagatcccggagggaatctggtgaggcctgaacggagggagatctggggctgaataaagggcttctgccctctaaagtcgcaaagacgtagggtgagccctatatctggacggggagaccaggagccagggaggggatctgcagaatgggcagcaggtctgaggcaggggaaagagaggggtcttacatgggaaggtggatccgtggcccggggactggggacccccgtgacagctggaaggagaagaaagaggcatagggcgcgtggaggggcgaaggagggcggtggcgcggcgtgccccagcgtgggtcccttccctcctccaggtgtctatacacgccccgcggagcagacggcccacctcctcccggtcctccggggaaggggacacatgagggactcacctgtggctccctctgcctgcagcaactccatccgctcctgcaactgccggacgtgtgcctctaggtcccggttccgagcctctgcctcgcgtagttgactgtggggaggtaaggacggtgagtccgtccgggccggacgagaggggatgccaagggttgccaccggcccgcatcccggccccggccccggccccgatcccgacctggcgaagttctggttgtccgtgcggatggcctccatctcccggctcaggctctgccgggtgagcacctcctcctccagggcttcctggagctcccgcagcgtcacctcggcctcagcctctgccgcagggacagccgctggaactgccacttcagcctgtgtatggggaccaggcttaaggctgcctgtggctcctggaagactcaggacttgggcactggttccaggctaggaatccttgtttatcccctactcctccgtcccctcaacatttctggaatccccatagctcctgcaatgatccaagccccctcccttccctacctccctcagccccatccctgagtctggtcctctaaatctacacagggaccagagggctggtgctcaaacactaacacaacctatgtccctctgctgctcaaaatccctccagctccctaatgccctcacgacaaaaggccttgctgggttttgtttcctgctggcctctccagccttctcaggaatgattcagccaaactacctttcaggaacaaatcaggattcccacctgcccaaggcctttgccctggaggctctcgcctgaccacttggcacctttccttccatggcttgtttctccttcaccagcgctcagctcaaagatcgacttctcagatccccagcaacacacacacccttacttaatgccccactgtaactacagagaccgtcccatgtctgaagtaacctcgtctctccgtggtttctgtctgcttctgttcaggaagtccctagagggctctacagtgcacgccacccgggaagccctcaccttttctctcccaattgtccctgacggaccccctcccctccaccaacttactgtttcatcctgtggggacaccgagggctccaggctgggcgcttgcacgtgtggctcaagcagctgctcggcctccagttccatgggtgtggggcctgggacctcactgtccctggggagaggaggagggagtggggagggagacagaatgctgattctctggtggagaaccagaacttctggcctgtgggtaggggcagctgcttccaagacctcctgatttgaggaaggggagcagcagagcgaagagaacagagtcccaggtaggccaatagcccctcctctgcttaggaaaagccctgcccctctcctggccttgggcccctgggagctgctctttctaaaccttccgctgcagacccctcttctcagggcctcaggacagggaggccgacctgatggggagactgcttggctctggccacctccacagatgtggtcctaagactgggcatgggaccccaagatggcaacttgaggtcagcacaccccactcagctgtgggaaggggacagctcctccctggggtatgaagtggctgtcccctccaacccagcagtccctcctgtgggaacacggctcaggacctagctatcctggacatgcgcctgggttctaatagaggatgggttcaatcctgacccaccgttcaggccccgcagcggttcagaatcaagctggagttcattaatgataaggtatagtatgtgtaatgttgtccagtaataaaagctgactagaaaaccaactgttctcttagacaaagtagcatgaggaaggggaaaaaaacaaaccaaaaaaacacctgttctccactatttaaacatgtgtcagtacacgtgtgagccagggaccactgccatctggtgagctcacgagatatcaacttccttttccttatctgtattttctaatttacttgtgataagcaatgcattatttgtgtaattaatacttttgttgagaccaggtctcactttgttgcctaggctggaatctatcatggctcactgaagcctcaaactccaggctcaagtgattctcctacttcagactcctgagtagctaggactgcaggcacagaccaccatgcctggcacgattttttcaattttttgtagagacagggtctcattatgttgctcaggctggtcttgaactcctgggctgaagcaatccgtccacttcagcctcccaaagtgctgggattccaagcgtgagccaccatgcccagcctgtaaattagtacttttttttttttttttttgagatgaagtttcactcttgttgcccaggctggaatgcaatggcacgatctcagctcaccacaacctccccctcctgggttctgattctcctgcctcagcctcctgagtagctgggattacaggtatatgccaccacgcctggctaattttgttttttagtagagatgaggtttctccacgttggtcaggctggtctcgaactcctgacctcaggtgatccacccacctcatcctcccaaagcactggaattacaggcgtgagccaccacacccggcctaaataaatacttttttttttttttttttgagacggagtcttgctctgtcgcccaggctggagtgcagtggcatgatctcggctcactgcaagctccgcctcccgggttcatgccattctcctgcctcgcctcccaagtagctgggaccgcaagcgcccgccaccatgcccggctaatttttttgtatttttagtagagacggggtttcaccgtgttagccaggatggtctcgatctcctgacctcatgatccacctgccttggcctcccaaagtgctaggattacaggcgtgagccaccgcggcccgcctaaattaatacttttaaatggccttattgttatatggctgattcaaagaatttgcattcttttacaactgattgtaaaagtctaaacttcatattttccaagttctgaagtcctgtggctctgtgtactacagacgtaaaagttaatggttacaagattctgggaagcccagtctgtgactctgaggttttaaaattcaatctaacattttgaagtacatagatctgaaaatttaaggtcctccaactctggcctcttaggagtctttgggcccaaaacagtaaggttccaagactgatcctgcaactccattggctgccaaggagcaggacccaggaagctcaagcagcctcgtggcccctggaggccgtccagggcagtgcttacctgagggccatgcaggagtaggagtagcccacaaaaggcaggtggacccctagcggcgcaccttcccgaatgtccgacagtgtctcctgcgcaagacacacagatgtgagcagcagtcgtcagggcgggcccctcactgctttttgatcttggcttacatgttccccccaaaccagccccaactcagggcttatctaaag

SEQ ID NO: 8714 - DNA, 12949 bp, Homo sapiens
caaaacaagctaaccaggggcactacagaggacttgtattattttattttattttattttctagagacagggtctccggtgcagtggcatgatcatagctcaccgcagccttgaactcatgggctcaagcaatcttcttgcctcagcctctggagtaactagaattacacgagccactgtacctaccttacagagaacttttaaagattagcagatctttctaggaatagcagcctattaggctgtatgacacaggtattcaattgcattctggcaggggccagaccccatgacctattttagtactttctgccttggagataattctctccgcctacttctctggactagttttccatgaatccacaagtctctgattctatcagcttgcatccaaagagataaatgtaagggagtttctgggagcagatttttgggataaccctgtgagtcatcctggcacttgcaccagttatctgacttctccatgccttgccttcccagcctatacagtgggtggggcacaacccacccacctgttttggtggcacatagataaggtgtctctcaccaggtatgctagtactgcttgcagatgtcaaacccattagttagagcttgactccatacagcaggaagtgagccaatcagagctcacagatggcatgagatgcacagattggctaaagacagaacagcactgaccacatggaggaaggaggtcagtctgggctgtgctgtcaatgtaaagcacccccattcattcattcactcattcatttgtttagtcaatgtttcccaggtcctatgatgatatatggtgaatatgtccacagttaacaattcttgaaaatcatagtctcgtgggaataactccatggaaggctaggttgtggaagtatacatttcccttgtagaacaggctcctacaaccacagaatatcatagccagaaggggtctcatctagcctctttgctttagattggaagagaaaaggcctagagacaccagggcactgtggaatcacagggtggggtggtggcacaattaggataagggtccaggtctttctatttgtgccttgaaatgtctgtctccagttttgttggcacatcttaaaatggctggtctcctagggcattttcttctctgtaaaatggggatatcccatcctacatataatgcagaaggcttcttaatgactgcttataggttgggtgactgaaaggtatggttcctgaagcatcatggattgtaacaccagaagcagcatgctttggtagaaaaacaaaatttgaagactcttttacctgggttcaaattctggctctatcacttctaactgtgtgagcttggacaagttattttttgtttggaacactatcgtgagaaccaaatttgatgagctaccccgtgtggtgtctaaccccaaaaagagatggttccttttccttttacttcataaaacatcaggtctgggtatgcactgaggagggacacttaggagagcagaagtggaatggcctggaaccacatccctcctcatttacccctccctttggggagagggaatgactggtgagcttcatggtggaagctgtgcagtaagacaagcccttcagaggcaggaatggcaggaggaagcaggacaccatgcctgaggactccaagccaggacaccaagcctgaggcagagtctcccatcttgcttcttccaaaatgttcaagagcagacaggcatcacactacctgactttaaaatatactacaaagctatagtaactgaaacagcatggtactggcataaaaacagacacatagaccaatggaacagaatagggaacccagaaattaatccatatatttgctatcaactgatctttgacaaaggtgccaagaacacacaatagggaaaggaaagtctcttgaatatgtggtactgaaaaaactgggtatcctcatgaagaagaatgaaataagatgcttatctcacactgtatacaaacatcaactgaaaaatgaattcaaaatgtaaatttaagattcaaaactatgaaactactaggaaaaaaacaggggaaaagctccatgacattggtctgggcaaggattttttgaatatgacctcaaaaacatagacaacaaaagcagaaactgacaaataagattaaatcaagttaaaatgcttctgtacagaaaaggaaataagcaacagagtaaagagacaacctacaaaatcagaaaacatttgcaaactatacatctgataaggagttaatatccaaaatatataaggaactcaaacaacccaatagaaagaacacaaatatcccaattaaaaatgggcagagaatctgaatatacatttctcaaaagaagacgtacaaatggccaacatgtctagaaaaaaatgctcaatatcactaatcaccagggaaatgcaaatcaaaaccacaatgaaataacacctcactcctgtaataatggctattatcaaaaaacaaacaaatgaaaataatgacaaagatgtagagaaaagggaacttatacaccattggcgagaatgtaagttagtgcagccattatgagaaacagtatagaggtgtctcaagaaactgcaaatggaactatcacattatccagcaatctaactactaggtatttgtccaaatgaaagaaaattagtatatcaaagggataactgtattcccatgtttattgcagtgctatttacaataaatagcaaagacacagaatcaacctaagtgtccatcagtgaataaatgaataaagaaaatggagtatgaacacagaatggaatactatccagccataaaaaggaatgaaatcctgtcatttccagcaacatggatggaactggaggtcattatgttaagtgaaattaggaagataaaagataacatgttgccaaggatgtggagaaaataaaatctaacacaccattggtgggaatgcaatttagtacaaccatgtggaaaacagtatggagggtcttcaaaaattaaaaatagaactggcatataatccatcaatcacactagtaggtatatatccaaagatattgaagtcagtaatattgaagagatatctgcattcccacatttattgcagcactattcacaataggcaataaaaggaatcaacctaagtgtaaatcaaaggataaatggatgtttaaaaatgctatatatacacaaagaatactattcagtcacaaaaagaaggaaatcctgtcatttgtgagaaggtgaatgaaccgggaagatattatgctaagcaaaataagccaggcatagatagacatactgcatgatctaatttatatgtggaatctagaaatgttgatctcatggaaatagagagcagagtgctggttacgagagattggggtggctggtaggtggggttggggagatatttaaagtattcaggggaagacttcgcaggacctggcttgacatgggagaggggctgtgaattagtgggtctttgcatcctctttgtttaggaaatgtagaagccttaaagcttatgggtcctgggaaatgtggggatctattatgtacaaatacagtagaacaatttacctgagaggccgtaggggccacggtggagcctgcactggtttatctaaggaattgacatttggaccagtgctaggcttaggctcaagacaactttcttcagtgggcgacccaatatagctcagtgggggtagcatgggctctggagctggataggcttgggttgcaatgtcactccattacctactgatgggatgaccttggaaaagtggacctctgggtctcagttttctcttgtgtaaaattggggctaatgaagcctgtctcatagagttatttcaaaatcaaatgaaataacacaggcaaagagcctaggacagtatccaccacatagtaagtgctcagtagataatattcccacctctctttctacatcttctgcattgtggaaaagaaaacaggcagggattcaaggacaatgccatgttcagaaataaaaggcaacatattgtagtaataaagatcatgatctatgaaagcagactcctgcatctgaggcctagcttccttacttacctgctttgtgatgagggtaactcccttaaactttcagggcctcagttgtgtccatttgtaaatgtactgcctcatgaattgttatatataaagtattcaaataaactttagattctattattattgttgttgttgttatcacacagtgctcatctggctggaattttccctgctcagcgttctttggaattgaagcctggtagtgaggtcctgaaaggtaagaatgggggagcctaaggggcatgagaaggctgaggggaggcagtctagactccagcctggggcctaggatcattaagcacccacccagtttccaaatgaacctagaataacctgatgttccatgaaacaaaccattttttggaggtcttgtgtcatattgggccagagaccactgggccaaactgtgctcagcaacctagaccagcagaagttaccttggaagcccacagaacactcatttaggctgagtgaagtgaggtgaatctatagttaaattctcaatttttcatacactgtgccaaaagctacacttagctttagattagattctcaattttagtttgattctctgagctacacttagcttttggcacagtgtatgaaaaattgagaatctaactataacttggataagtcctgaagactcaagtgacctggaaacagcttcattagagacagatcacataggcatcactcataacttataggaaaaggagactgacttgtttcctgaggaagggaacaggaatcatttatctagtgtttgggaaaacccaatgtcaagcacagacatgccctgcctctgactgaggagccaggcatactggggaggaatcttgccaatgcaacaccatcccttctccttgtgatctctggtgcttcatttagatgccattaaattgcctcattgctgccctataaaaggtctccccacctgctagtttttcagatcactgrcttcttccagtcttgctcctatcagcaaagagggtaagtctctatacgggataaggacatggtgagaaacagagctttggggaagctggggtgggatgagagctgtgggatgaagggtgagcgaggactagatgcttaggaaatctgctgaaggaggctgaaagcaatgctggtgggaaacttggagcctggggcatgagaggagagggagggggacacgatgagctggcattcctgtttaagaagggactttagagaactggctccccatccccttatctgaatgcaattgtgcagtcctctcttgggtctatgtgctaatgaggccaactgattagtccagctggttcaaggagcacctggtagaaacctgctcaaatttagccttgttctttgctcagtaccgggcacagcttgaggctcatgttggctcagggtccatggacataaatttgtctttgctgggtattccttgtctgggcagaaggaagaagggaagtcaccctggagagaactggtggcaggggtcaatcatctgggagcagcaatttccaaagggtaattcacaatgcagacactgaagaaagaggagaggaggcttggagagttgggtagaaacacaggcagcaccatttcaagcctccatttcccaatatagagactgaggcccagaggtaagcgatgacttgtaccaagccacatagccaggtacaggcacagaagctgagctgagagtccctggctctgaatccacctcctgccaagtatacagcctctggatgtctgcaaccttctcaagaaagccttgcttgcaaatcactgtattcaaaggggatgttgaaggtttcccctagaaaccttcctrgttttacagttctaatgaaacctttcttttcagattttgcaaagccacagaacaatgtgtgaccagcagaagcagccacagttccctccatcttgtgtgaaaggttcgggactaggggctgggcagggtascaatggtgcctctgtgaaatgcccagttccatgccagacccaaactgtctgtgtgacaggccctgctccatgccctactcaaacttatgtgaagtaccaagttccatgccagactcaaacctacgtgaagtgcccagctccctgccagaggacctatgtgaaatacccaacaccctgccaaacctatgtgaagtgcccagctccctgccagacaacctatgtaaaatgcccaactccctgccaaacctacgtgaagtgcccagctccctgccagatgacrtacatcaaaagtccagctccctgccagacccagacgtgctatgtccagggtgcttctccttgccagagctattatgttcaagctcctgcaagtggctcaacctcccagtactgtgkcactgacccatgctctgctccctgttccaccagctactgctgtctggctccccggaccttcggggtgagtcccctgagacgctggattcagcggccccagaactgcaacacaggatcatctggctgctgtgagaattcgggaagctctggatgctgtggttctgggggctgtggctgcagctgtggatgtggcagctctgggtgctgctgtttgggaattatccccatgaggtcccgaggtcctgcatgctgtgaccatgaggatgactgctgctgctaaacatacgacagctcaactccagaatgcactgccccgctaccccttctggaacatgcaccagcttctggccccctctctgttagtgccagtgatgtagaacctcatcactttgcctctgtgctttgcttctctaccaaggcagcctgccagagttagtacagtccccaaactttggcatgaataaagctctgaatgcawttcgtggtaatttctgtctgtttgtttggtccatatttatgcttttctatcaggcactcttctgcatccctctcttcttactcttgtttctcagctagaggaaagatctgcacgaacatgaacaagcagactgagctggtgaaatcccagcctgggagccccatgccttctagaatgctgtgaataaactttcccacgcaagttagaagcatctgaaaatggagatttgagggttggggctgtttctgtgctgccctttgatgagcctcagagcagggttgaccatgatgagaccctcatcttcctgggtgttggagagattgtgaaattgtatctgctcatggaccagtatcactggtcatggtcagtatcactggaccatgtctccaccactgtgcagagggcttgaacccatgcaggactttatgaattacattttctcatctgacaggcttgccctgttgaaactataggttgaaggcctgagggaaaaggctaggagccccctgaagtgggtaggtattcaccaggtcagtcctggtagtaagtgagccatctccaaaggaaggtgaatcttgtgcgaggggcttctgggcccccttctgggcccctcaccctagttagctttttcttctccattgcttagctagctctagagaatttggggtggacttttgtaactaaagattccaaatacacacattaaaaaaatagaggagtaacaagtgttcaaaacaatcccacaaggtctggtgcataggagacaatgtttggtgatgtataaatgaacgcataaaggaatgaatgaaaaagggaatcatgtgtttgtttctaaccctggacactagcagaagatcatcttgactactctgctgcctttgaatgtctaaacacctgtatctccacaaacagcacaatatcccttcatccaaactccctaaacttacagcccagtcactggaaacccactcagggaaggaactgccttggccagggccacactttcctcttgtaccaccaactgggtcctgcaatgttggaggatggggtgctaaagttccctgtggtctagtctctttagagaatggtatctgcaaagcccaactcagcactgaaaatattgtagggaatcctctttaaaacccaatgcaaacttctaaaaatcctatttctatccttttcaattccttcatattccatagctgttcatcagtctctcactaaactaccccaaatgctcctaatatccagacattgtggcttctttcatctctttctctccttgctcactctcctttcctcctcaatcccacctggttctggtcctggttatgtagatggtttgagtttttctgtctcccttgttaattttctctatacttacccaatcttagtattctctgctccataggaattaacctaggaataaaacctctcctcttttctccagctgttctaatgctttctctaacccactctattggttttgtacaagagagaggaaagtagttgaaaccaagagctaacctgacgaagctcaccaaactcaacctgccttgcttgcttttagtcacttacttctagttaatcttaaaacccatgtagctaaaagtcacacagctaagcaatctgctagcttccttttagagaacatccctgacatataagttaccatgctgatggttccttgttgtttttttaagaacttggtgttggctgttttctagttcaagctgaaaccaccgacccttcaactgggcctgcaagaatacctgagaggtgaccttttgatgtcagagggtcaaaagctcctccctcagagcatgctaataccaccattttctgaacatgcttcttatgaagagcaatgaagcttgactatgcaagtgcaaatagccacttgcctcactgttccttgcctccaactgcctttccccaggccctgaactaccttgctcttctatcccataaatgtctctgaaaccatatcttggaaaggtggatttgagatccgttggctgccgtggcttacagtgcacaggcagcacacatctagttcagtatcagaattataaagctcaaagggcaaaaatataattttctttaatagagcatatgagtggaagaaaaagtcaaggagcaaaaacctacacattaatatatctcaattgattgcatatcttagacttttctgttttattatataggatcataatacatgttgccctatgactagctgttttcatttaatacgtcaatgttgaacataaattttggttagtgcatatagtcatatcttctttccttttgttgtttggtttttaatatttccttagtgtggctgctcaacgatttatctaaccacccccttagactgccctttttgatttctctttttctcttctctttttctccctgtctctgtttgcctcttattattaccatacaagttgctgttaaggcctttttcaaatgttttcaaattttctatttagatgaaacacacttctagaaaagtatacaaattagaagtgtattactcactaaacacacgtgtataaccaccatctggaccccagaaagctaatgtcatattgaaaactaataaagtccctgattaccatgaactaggagactgaatttggagatatgaaatggattagagcagaagtrgctttatataatcccaaaccttctcaggagccctgattgtgtgttaggtagatatgtacaaaagacaatgtaaagagaagcatccgccctggggtctaggtccttcagacatccaggtgagttctgagagcatctaccagtgaccccaccacacagcagtgtgaccttgctcttacacagagcagaggacactgagcagcctgataccagtgcttgagaaaccctcagtaacctggccagtgtgaaggttctataacaactttcttgtcagattataattcatttatctaatatatagttattgaacttctatgtcattccgggcaccatctctattgttttggagtttacagcagagagggagaattttaaaaaagcaagtaattcaataaacaaatgtaagctgcatctaggactagagttataaagaaagtgtttcaaatatctgtaatatgcacattttacatggtcaggaagatcagaaaagacttccctgagaaagtgtagcttgaccccaaggttgagtaggagttaataacagaacagtgacggaagacttttccatgcagaagcaagagcacaggcagggctctgttggggggagggggaggggcggagaacaaaaagtgtaaggggctggtggtgagacagtgagaattaaagcagaaaggggcagaagggcctgggggctaagggcaacctcggtgtggggcatcccagcagtcattgacaggttgcaagcaggccatgtgatttgtgccttttaaagtttaattttctctgcagaaaaaaaatagatatacttgtagagcatataaaggagaatctaaaacaattgcccaatagcattagtgtacctggttctctcctagccctgccatgcataactcccctctttgggtctggttttcatgtctgtaagatggcagcttgggccataagacgagtagggtgcatttcagcaccagcatcaggtgatctttgcctcctggtacagggacttcagggtctcattttaaaactggtgagttacaaatgtggccttcagaatattcagtttcaagacattttttgtttaaccaaaagttctactatattctgtttttttataacttaaaaaattttggtccactgtttctaatgtaagataatccaaatttcctggctcttttttttttttttgagatggagtcttgctctgtcgcccatcctggagtgcagtggcgcgatctcggctcactgcaagctctacctcccaggttcacgccagtctcctgcttcagcctcctgagtagctgggactacaggcgcccaccaccacgcccgactaattttttgtatttttagcagagacggggtttcatcgtgttagccaggatggtctcgatctcctgacctcgcgatccgccggcctcggcctcccaaagtgctgggattacaggcatgaaccaccgcgcccggccaatttcctggctcttaatacctttacaatatttattggagatttgactataaatgatttagagagaatggcaagtccaaaacatggaatgaaaccccggggaaactggacagagattccttgaacaggccgagatgctgctatcctgggatctcttatgaatctgctttcccataatttttctggagtagaaaagtctactgagtagaatcccaaccccacttgcctgggtaagatagtttttatgatgatttctcttgcaggaaaatacttctgccaaatttcccgacaagtaaggctaatacctgcagagagactttgtaatatttctcaaaattaagaaataaaatatagtcatgtacatctaaattttatatcttacacgtatttattatttttattattatatatttttaagatttagtttttttattatactttaagttctagggtacatgtgcacaacgtgcaggtttgttacacatgtatgcatgtgccatgttagtgtgctgcatccattaactcgtcatttacattaggtatatctcctaatgctatcccaccaccctcccccaaccccacgacaggccccggtgtgtgatgttccctaccctgtgtccaattacacgtgtattatacatatactgtgaaagtacagccaatattagtaaagacccataagaaaaatgactcaaatctatttattcttgacacctaaaggaaaagacagagaattgccctttatttattgagggcctactatgtgtgccaggcactgtgttagtcactctgcatgcaatgttctccttatctgagtaatgggaacactgatctgaattagctggcaggttttgggagaaggccagtgttgtggtaagatctggatttttgagtcagacacatgtatttactgaccctataactccagacaagttagtagtctctctgctcagagagattgtgtctgctaaaactgcctaagataatgccttccacatagtaggtgcacaatgtgttaagccattttcctattcctggttggaggggctctgacagtaaatatgaaaggcatcttagaggctaagagggtgacagtcatattatatgaaaagtattaaaggggtttttatggtttgggatttttagttctatagtaaaatgtaatgagagaaggttttcattacagacaaagttatgaaaatgtgtaacctgatgtcacaagtgactgttgtctcccagcttctcctacctccgttcttatcccaattctgccacaaatttctttgtaacattaaataagccacttcacctatttgggcctcagtttcctcctctgtaaaatggggaagttgggtgcaaccatcactaagaaccttttctacctctaatactctgtagctcccattctttgaatcttcctcaaagttcagagagagtatctccctaagatactagaaatggggcagtggtcttagagattaccacttgcaccccataatggagcataagaagtggggcacgcagataatagctgctggattggagccagagcttgagaaaaaaaggaaaatctctaccaggtcctcagacagaagttggctggagaaaatgtcatgatcagatatgtttctttgtcatctgtgtaaggatctccacccagctgatggcagtktacggcctgatttagcatgtctgctgtgagaaacaaatgggtgttggggtgggctgggccacgggagaagaagaggaggcagggtagtatgtgtggcaccaaagggctgagaaaggcgggcagtgagtaatattctcagagatcctcatggccagcgctcccgctcagcttacatggacgttctgctggg

SEQ ID NO: 8715 - DNA, 1126118 bp, Homo sapiens
  misc_feature (1)...(1126118): n = A,T,C or G, or insertion/deletion polymorphism (see Tables 1-2)
aggaaactaacatgggaactctccctgtttcagcataccttacaggtcttggtttaaatttgtcttagaaccttcaatccacagttctttgggttgactgttgaccttctgctaattcactgttatttctggatataaggagtctctctctatatatatatcagagacagcttttttttttcatttgtgtgtttgaatgaatagatgaaatacaaacatatcttcctaaataaggacgcattgattagaagagttttccataagactgctgttcaacattcttccttattggttacttctcaatgagaaattatccgaagagctaggatgcctcccagatctcattggtacattgagttttgcaccaaagcatcaggcttaattttccaaggaatggcaatttaagttaaatcaggtttgcagagttgtcggggtgtttgtgtatttgaggttgggaggggaaggaaacgatcatcttcagggtaatgataataaactaataaaatgtggctccaggaatgttgcactaaaactttgtgcctcctgcatacatttcttttgagtaatgccaaattgtgttcagtaaaatctgatcaatcttatgtgcgtaaattgtcagttattgcagaagtaatcagtcaaaaagaaaagaaagtttaaatgtagagacccttgttaggagctgggctttagcctttaaaatcgtgggtggatagggccatctggtgtgcagttgtgtaactagacattgctgttttttttttaacctccttgctaataatcaatgtgattcatttgtctttacaaaaacaaaccattcttttgttttgtttttttttcttcaacttttactttaatttcaggagtatatgtgcaggatgtgcaggttttttacacaggtacatgcgtgccatggtggtttgctacacagatcttcccattacctaggtattaagcccagagtccattagctattcttcctgatgctcttcctcccctcctgcctccctctgacaggccccattgtaggttattctcctccatgtgtccgtgtgttttcatcagtcagctaccagatagagaacatgtctagtctgttttcatgctgctgataaagacctacccgagactgggaagaaaaagaggtttaattggacttacaatttaaaaagagatttaattagacttactccacatggctgaggaggcctcagaatcatggcgggaggtgaaaggcacttcttccatggtggtggcaagagaaaatgaggacgaagcaaaagtggaaacccctgataaacccatcatatctcatgagacttactcacttcacgagaatagcatgggaaagaccagctctcatgattcagttacctcctgctgggtccctctcacaacatgtgggaattttgggagataaaattcaagttgagatttgagtggagacacagccaaaccatatcaatgtggtgtttggttttctgttcatgtgttagtttgcagaggacagtggcttccacctccatacgtgtgcctgctaaggacataatcttgttccttttcatggctacatagtattccatggggtatatgtaccacattttctttatccagtctatcatcgatgggcatttgggttattctatgtctttgttattgtgaatagtgctgcaatgaacatatgcgtccatgtatctttataatagaatgatttctgttactttgggtatataccaagtaatggaattgctgggtcaaatggtatttctgcctctaggtctttgaggaattgccacactgtcttccacaacggttaaactaatttacactctcacaaagggtgtaaaagtgtttctttttctccacaacattgccagcatctgctgttttttgactttttaataattgcccttctgattggcatgagatggtatctcaatgtggttttgatttgcatatctctaatgatcactgatgttgagctttttttcatatgtttcttggctgcatgaatgtcttgagaagtgtctgttcatgtcctttgcccactttttaatgggattgtttaaaacaaactattcttaaggctttcttagggtaacatttggagaacattggctcattcccaaacataagccttctcaaaccgattaaaatctaatcctcaccaagttaagtagggcttgcctgctgatagatcctcatcagagcaaagtcaaagctaaagttcagggggacagaaactgagtaaacagaggaagccagtaaggagagagcagaaaatgtagcccatgggagggaggagacaaacctcaagaggaaaaagttcccaacacttgcatgtcttacttctttaacctcatagaacccaacaaataagttataagaaagggagaagaggccgggagtggtggctcatgcttgtaattccagcactttgggaggccagggcgggtggatcacaaggtcaggagttcaagaccagcctggccaagatgatggggaaaccccgtctctactaaaattacaaaaattagctgagtgtggtgacgctcacctatagtcccagctacttgggaggctgaggcaggagaatcacttgaacccgggaggtggaggttgcagtgagccaagattgtgccactgctctccagcctggtgaccgagtgagactctgtctcaaaaaaaaaaaaaaaaaatggagaagaaaatgtgatcatgataaccattcccgccattactggagcctggaccagccggccagatttccacaggatgtctctgacctgcagaggggctggcaaggtgggaggcatccagaccatgttacagaactcagtaatcagagcctgtgctggagccaccagcatcccaggaccaccatgtgaacctcctgacaggagcaggctcctcaatgactgaaatgaatctcagcagaactcctgtgattcataagtgactcatttactaacttattgtcagtatagattctccactgggagaagacgggcaacttctggagacatttttggttgttacaactaggagaggggcatctactactcgcatctagtgggtagaggccagagatgctgctaaacatcctactgtacagccccaccacaaagaatgatctggctccaagtatcggtaatgtcgaggttgagaaaccctggtgtcagcagtgggagaagccttagagggaatttccaaagtggtaggatcagcacaggatagaccctgaagtttaaacttcttccagggggaccgttacccagtttggggaacaccatggtatatcactagctgtgggctgatgccaagttacaggtaacagatgccagcagaagctctgggcagaggaaaccaagataaacctaagcagacagtccttgtgaaactgaacagagtcaaagataatgaatggagaaactgaggctaatcagtttgacctcattccttcctctccccacaatcaggggatcttatgactgaatttcttacaaatagcaaaggaataagtaggcttaggtgagaggggaaaggggctaaattgaggggagcagtggagcaacagattagtggtagcagatttatttttatttatctttttttgttgttgttgttaagacagaatcttactctgtcacccaggctggagtgcagtggtacaatcatggctctctgtacccttgaactcctatgctagagcctaggagtaaatactaggattactagagtaatcctccgacctcagcctcccgaatagctgagactacagacatgcaccaccacactggctaacttttaaattttttgtagagatggggtggtgggggtcggcggggggggggggggggtctcactatattgcccaggctggtcttgaactcctgggctcaagcaattctcctgccttggcctcccatagtgctgggattacagttgtgagccactacgcccaatccaatggtagcagatttaaacacaggtggatttggaaaaaaaatcttacgataggtttaatatgagtcagcaggcctgttgaaacaaaacagtgctttgttaagcttgtttttggttggtcaaatgtagaaaggcaggtgtctccgctaatgagtacgtagagcaggaatcctaagcaatcatccatttcagaacatgaagacaaaaagcagctgcccctcccatacactgcccattaaaatacatacttttaaaattccttattttcaattttatttttttgctctctcagaagaatcaaatatatgtaattattctgatggaggcttgcattctttgggacctaggcctgagaaatcacggtcagtagatttccctataacatggggctggggagcaagtgccaaacagggaatgttctgaaaactccttaggcacaagctgaagatatgtttgaggttttggatacagaacatttataggatatcttttggtggtccaagaggacttgagtgtaccttgtaaatacaggattttgtttttaattagattgattcacagagaaccaaacctaaggaatcacatcattcattcatttgttcatttaataaatttgtaggttgaagcatttaccaagtgctggcaatagaaagaagtcccgggtgtgctttgtcagtttagtcgggactacacaaatgagtcaataactgtagtggagtgatgcgatctcaactgccaggaatcccccggctctcctctcttcctgtgcctcctcaggtaattagctatcctttctttcttttattttccttccttccttccttccttccttccttccttccttccttccttccttcctccctccctccctccctttctttccagattctggacctattccagacttactaaaggaaattctctaaaggtgaggcagttttttaaagacagcagctctctctgtcgtccatgctggagtgcagtggcccgatcatagctcactgcagcctcgacttcttgggctcaagtgatcctcccccttcagcctcaatgagtagctgggactaccgatgtgcactaccacgcccggcaaactaaaaaaataattatttttggtaaagacaggggtcttgcgatgttgcccaggctgttctcaaactcctggcctcaagtgatcctcctgcctcagcctcctaatgtgtttggattacaggcatgagccactgagcccggcctagctaccctgtctgagttgtgcccactacacaaaggtgtcagctacatgtgatgtctgtgcatttctggcctggaccgcacattaagtgctccgtaaacatcagtctctattatcaacagtctctattatcaatcagtctctattatcatcagtctctattatcatgagtctctattaaacaacagtctctattatcacagtctctattatgtgttttggctgaaagaaagttctctaaaaccaggaaatcaggaatcagcagttttaagttctccaggttatattttaacattgtgttcatatgcaaaacaaaggttgtgaatcagcacgaatgctggcaagccctggaaggtttgtgatcacggactttcacgagaccccaaggcaaggagagacagaagcccaggacaacagcatgggcgccgctttttagtcgggcgccgctttttggtcaggcgccacctggactacatttcccatatccaattgccgggctcctgcaggattggccagaacaacgcggaagtgattacgggtcgcccagcaacgggcggagtcctggcccgaaactggatgcgcacgccccttccctgcggcggggaggctgacaaggctccgctctatctctagcgcctcggagcgctctccggctttgctgtctagcccggcggcagcgcgatctcttaggcactttcaccgccttcctctccaggccctgcccctttgacgccggccgtcgcgatattgcggagactggatttcagcttcgtggtcggcggagcggcccctggagggcgcagtgcgcaggcgtgagcggtcgggccccgacgcgcgcgggtctcgtttggagcgggagtgagttcctgagcgagtggacccggcagcgggcgataggggggccaggtgcctccacagtyagccatggcagcgctgcgctacgcggggctggacgacacggacagtgaggacgagctgcctccgggctgggaggagagaaccaccaaggacggctgggtttactacgccaagtaagggggccgcagtggggccgcggacgcacctgggaccctgcacagcccacggacgccacctgcgcggggaggacgcgcactccagcgcagcgcgtgcggtgcaaagtgaaagtaactgttaaggagcttcagggaaaagggtccagggttcccagtaggggccgscccccttggtgggcctcgggtccagcgggggtcacctggtggcttcccggcgcgccctctgctgttcaggatgcagcactgcgyggcgcggcgagggcaaagcggcctcatccccgccaaaaaataaagatgttttaaaaagcgcacatgctcagctccctcctgcaggctctgggttgcagggataggagttttgttgtgttttgttttgttttgtccagaccggtattgctcagtcatccaggctggagtgcaggggtgccatcatagcccactgtagcctctacctactgggttcagacaatcctctcatctcagcctcttgagtggctgggactacaagcgtgcactactatgcccgactaattttttaagtatttgtagagactagggtcgcaccatgttgcccaggctggtctcgaactactgggctcaagcaggccacctgcctcagcctccagaattgagattacaggcgtgagccactgcgcctagccaggagtattttttagtagcagtcctagatagcttcactatcatttcctgggaaagttttggaaaccccagcagagccttcatctttaactgtgtgaccttgggccattgaaataacgtttaatcttggttttttcacctgtaaaatgggttgatatgagggtcagttcaggcactgtgcgtaaagcacatagcaccgtgtctagtaggtactctctgttccttaactgtckttccttgattrctcttaagatacgacartgcctcttatatcggcaccttagaatcacctaggaaatgtcctaaatacacgttttgggtctccatagagaacctactgtagccgactctcaactttgggagtctctttttttaagctttccaggtgaggtggaatatcacctggttttgagaaacatggatgtaaatctgattttcagcatctgggaaactttttttgtaagagcctttttctgggccccacttccagagggtttttctttttttkttttcttttgagacggagtcttgctctgtcgcccaggctggagtgcagyggcgcgatctcggctcactgcaacctccgcctcccgggttcacgccattctcctgcctcagcctcccgagtagctgggactacaggcgcccgccaccacgcccggctaagtttttgtgtttttagtagagacggggtttcaccgtgttagccaggatggtctcgatctcctgacctcgtgatcctcccgcctcggcctctcaaagtgctgggatyacaggcgtgagctaccgctcccggcctttttttttttttttttttttttttttaagacagggtctcgctccgtcgcccaaactggagtgccgtggtgcgatctcggctcactgcaacctctgcatgccgagttcaagcgattctcgtgtctcagcctcccgaatagctgggattacaggcgcccgccaccaggcctggctaatttcgcgctgttggcccggctggtctccaactcctggcctcaagtgatccgcccacctcggccccccaaagtgttggcattacagacaggagccactgcgtcagcccagaatttctgatttaattggtttggcccctcccctctcccttggtaggttgtaaaatcttccctcccaggtgattctaatctatgcaaggatgtgaaccactgctgcctttggtggcaaggtagaggaaaaacaaccaagttctgatgagttcattcaagacacacacaggtattatgtgacaggcctttggctggcactggttataccgaggcaaataagagccagttgtcatccttaggacccaatcttattagggcacagtgacatgtgtaggagcgtccccacgcagtgtgtataccaggaagtagtgtgtctggcatgaggtgtgtgtaggtagttgggggggtcgtgagggaatatggtggcaccctcacagtaaccttcacttcctgggctcaagcgatcctcccgcatcagcctgttgagtacccgggaccacaggtgtgtgcctccacacccagctaattattacatgttttgtagaaatggggtctcaccatgttgcccaggctggtttgaactcctgaactcaagccagcctccctcccgaagcactggaatcacaggcctgaggcactgtgccaagcccagagcggtgttttgagctcaagtagaggtgggtggggcaggagggcagtctaggtagagggaacagtgagaggagagaccccctgcatggcctgtccaggggcctgtgatctttgtgagggtccaggaatgtgaaggttaaggcagsgaagggaggacccatttcaaggatttctgtgccttgccgagaagcttgggctctgttggcagagccagagagtggcattcattcagcttgtgaattctggaagaatttctggctctggagaattaaagggacatttccagcagcagagctccagtagcttttgcagggacggaggcaagctcctgagcgggcacttgctgttcctctcacctgtacatctgttggggaaaggctccttctcatccttcagagctgagcttacatgtcactgcccaagagaccttcttaactgtgggtgtcccctcgaccttgtactagtcaccttgyttctctgcttcttcgtgcttagccttggctgtgtactcctccttgttggccctgtctcccttgcccaggttgcagatgtcatggggcagcttgttcatctgagtgtccccagtgcttggcacccagaagccataagatgagcccctgtgggatgagtaaatgaatcaccttgggagggtcagccgcaggcttctgtgggtgggtgggtggtgcactgggccccagagtacaaagatgcacatgacccgcttccggcttcctaagcccacctctgcctctggctctgtggggcgtctcctcctttgccactcagccccagaggtgcttctgcttccctgcaggcttgccctggagcctggcgctagggccctggggctcccttgctcctgcktgccccctgygcctgccttcctgctgcctggcctttctcccatctgctttcttcctgagtggcccctggccaggggactcgggtgcatacatggtttccaaacrcctttcctccagccctcccgactagtgtcttaaatctcaagctggcctctctggctccgctgtttttttttkttttttttttttaatttaatttaactttaaattccgggatacatgtgcaggatgtgcaggtttgttacataagtaaacctgtgccatggtgacttgctgcacttgtcaacccatcacctagttgttcagccccccgtgcattagctatttattgtatacaccagctgagatgccagggcttggctggctctcagctggagggctcactctctggaccttgtgtccgtccccgctggccctcagttctctggatcagggttgaaaggctgaaattctttgggtgttagcttaggatgcctctgatccatcctaasccgacattcccttgatctctcctgatctgtgagcatcctggcccttcttttcttttcagttttaatttttgcgctggctccaaccccttttcattcctgactctggaagtgacacttgtttttctcttggggtttgggaaactttgtggttgttctttctaggaggctgctctttgagtcatttcttttccatattgtttctcctactgtagcagggccatggccagggatagaggctgtagctcccactgagacctcggggtctggtggaacccggtcttgtgtgggtgctgtcggcctctcctgctttcccacctgcctcacggttcacttgtgtgcctcaaaggcacacatgtcctagcactccaaagcccaccagggtgggctcccaggggtgaggtcgaggtagaccgggaacccaagagagctggtgggcctttcttctacccctctcccctcacagtctcagagcagccccttcatgggagatgggaagtgagggacaaggtctcagtgtcagagccgtccttgtttgcccttccccgtgcctcttatgaagctcaggccttttggcagtcagaggcctcaatggtgcctgtgtccacagggctggctgtcctcaccgtsaagtctagatctccctgctaacttacactgtgctcaaaacacacacacacacacacacacacacacacacacacacacmcacactggctgtcctcacygtcaactctagatctccctgctaacttacactgtgctcaaaaaacacacgcacgcacgcacgcatgcacgcacatacacacacacacacacacccataggctggccatggtgggaggccaaggtgggaggatcgcctgagcccaggagctcgaggctgcagtgggctatgattgcatcactgtactctagcctgggccacagaatgagaccttgtctaaaaaaaaattaacagaaaacaccccatacgtggaagtgtggtattcacataatatgatgttcacttaaatttgaatcctttggtttaagtttagattactcttaattatctttttaaatgacaagctcgttgaaagaataaaaaatcaaagacggcttctatttaaaggagaataggagaatgcttaggggacatgtgttctaattttctcttcattaaaaagtcatttaaggttataattaaaaagaacatcttttaattaatttttatatttattaaaaaaaagtcttctattgaaaggtacagttcttagttcttcccgtgttaactcactcggttctctataaccccaagaagtaagtgctgttattgtccccatctaaactgttgaggaaactgaggcatgggattaaatgacttcttcaagggcagagtggctggcaaatgggagacccagaaaaccttggcagttgggcttcagaatcttcacgaccaaattactctctctgcttcagctggttccggattcttccccagggatggttgtgtcctgcaggggacggctggcaatgtctggagatgctttctgttgccacagctatgggactggggtattggcatctgatgggcagaggccagtggtgcccaaggcagccccgcaacaaagaatgatgcaggccgggtgcagtggttcacgcctgtaatcccagcactttgggaggccgaggcaggtggatcagttgaggtcaggagttcgagacctgcctggccaacatggtgaaaccccatctctactaaaaatacaaaaattatcccggcatggtggcaggtgcctgtaatcctagctactcaggctgaggcgggagaattgcttgaacctgggaggcagaggttgcagtgagctgagattgcaccactgtactgcagcctgggtgacagagtgagactctgtctcaaaaaaaaaaaaaagaatgatccagccccaagtgccaccagcagtgagaataagaaaccctgattcaggcatgttctgtgaaagtcaagaacgtaggttgacagagtttgttttgttttttaaatgtctttctgaataaataaaaactgttctgagtgagttttgtagttcctttggaaagtattcattctgtttgtttacatttgtgcgcctgctgtgggccaggcatgaggctacatgtctgagggcccagcttcaccttctaagggctgggaggctctttctatgccagcctgcctgccaacaaggctcagcttccactgttaagggtcattttgtggatttttttattttttatttttaggttgagtcttgctttttcgcccaggctggactgcagtggcgtgattttggctcactgcaacctccacctcccaggttcaggaaattctcatgcctcagccactcaagtagctgggattacaggcatgtgccaccatgtctgtctaatttttgtatttttagtagagatggggttttgccatgttgcctaggctggtctcgatctcctgggctctagcgatcctcccgcctcggcctcccaaagtgctgggattacaggcgtgagccaccgtaccccgccactccatggattcttgagggcagagttttttggagccaggcttcaagcacatttgatgtgtgcctatgagataaagactgcttttaatggcaggcaaggaaaatgcaagtccatctcttaactttcttgaagaagcttgagacacagctctgcaaggggctggaaggtttcatgttattgccaatgcttggtttatctgattgctgttgccattcattttgaaggagaagcaggagttggtataccaatattcccactgtgccagcagagagcgggttatccttactagagagccagagagtcagaacggtttttttttkttttttttttttttttttgagatggagtttcacaattgttgcccaggctggagtgcacgatctcagctcaccgcagcctctgcctgccgggttgaagcaattctcctgcctcagcttcccgagtagctgggattacaggcatgtgccaccacgccaggctaattttgtatttttagtagagacagggtttctccatgttgktcaggctggtcgcgaactcctgacctcaggtaatccgcctgccttgccctcctgaagtactgggattacagacatgagccaccgcgcccggccacagagctgcttttttttgcaagtgatattggatggtggttgatgtacaaagtaggagtttgtccttgctactgataccgtagctggtacaaggttttaatcgttctccaagcactgtcacaggtgtcatgtgtctcgccttttcagcagctctgtgaggtggcagtagccctgaggagactggctggactcagctagcatgggctgctcaggtcttcagcgtgctgagtgaggcattcctgcactatgacagagacccagctgccaagactttgtcaaacagaccagaagccagcagttcatgaaaagaccttgcttgcaagttgtagaattttttagaaaattcgtgctctctgtatttattttctgtaaaataattgatagggaaagaatgttcacatcttatcatctagatgttgctgattaaataatataactttctgggttggcatgagtaggtgaacttttaggaaacgcagcctacccttcgaatacctcttgtagcacctggctgtttcccttttgaaataattgtatgttttcctggataccttattacctggtgacacgtgtttctagttattgacctatgtttttaattataactttgggtggtggtctgaaatgaaatgttaagtttgacgcaaaaatmggactagtttgtgtaactgatttgttcaraataacagcttacatttctcagagctttttgtatgccaagtgctatgcgaaaccctggatgtacaatattcttatagtagcccctgagaccagtgctaggattatttccattttgcagatgaggggatggagattaaggagtggggtcacttgaccaaaggtgcacagcgcacagctagrtgccctatgggaaggtcttactgcatctcttaactacctcttgggaccagttaggaaccagtgcttaatgaaacactttgaagttacatctgtggaaagaataaacattttagctgggcaaggtggcacgggcttctagtcccagccactcaagaggctgaaataggagggttacttgagtccaggagttccagtccagcctgggcaacatagtgagaccctgattctttaaaaagaaacacaaataaataaacattttaagagattatataaattagatattatgaattttgtccctacatcgtggaataaaaccaaaacaaatacacagcaaaatgcctctagatttatttatttatttatttatttttgagacagagtcttgctctgtcgccaggctggagtgcagcggcgtgatctcggctcactgcaacttctgcttccctggctcaagcgattctcctgcctcagcctcccgagtagctgggactacaggcacgtgccactgtccccagctaattttgtatttttggtagagacagggtttcaccatgttggccaggatggtctccatctcctgaccttgtgatctgctcccctagggctcccaaagtgctgggattacaggtgtgagccaccgctcccgacggcctctagatattttgagtgattcagcaaacctcctaaagttgaccccgtagctggggtcacagtcctctttctccttcttcccccyacttccttcttatatctggctatctgggagagaaaaaatttaatacaattgattactttttagaagagttaatttttacttattactgkggattttttkttttttaacagtcacaccgaggagaagactcagtgggaacatccaaaaactggaaaaagaaaacgagtggcaggaggtttgtatgttgttgtctaaggatcttggatggaagcattaagtagatgaggaaatgtcactggcagagaggtgacaggttattgtgtgtttagggagggctctctggtagagaaccagactcccactctgaggagcttatgggatttggcagaagaagatgatgagatcatagggtggagtgaggatgatttcttactggtcttaaagtaccaaaatggccagatgtggtggctcatgcctgtaatcccagcacttcgggaggccgaggcggatggatcacctgaggtcaggagtttgagactagcctggccaacatgttgaaagcgcatctcttctaaaaatacaaaaattagctgggcatggttgcatgcgcctgtaattccagctactttggaggctgaggcacgagaagtgctcaaacccaggagctggaggttgcagtgagccaagatcacaccactgcgctccagcctcggtgacagagtgagatgctgtctgaaaaatagcgacaacaacaacaacaaaaaccagaaaataattgaggcctttgattcacagtttatgatgttttcctatcgttgcagtgtttataaaattgttcttggctatactatggaattaaatatataagtatttggaaatttcgtaaagattaccatgacttctaggtgattctgagataatgtatgatccacggaatagaagtataagaaagggacaggcacggtggcttgtgcttgtgatcccagccctttgggaggcagaggtgggaggatcacttgtgcctgggaattcgaggtgagcctaggcaacatagtgagaccccatctcaaaaaaaaatatgagaaggttcctgcccttaagaggtttaggatccagctgaagaatcaacatgtgcacatgaaaaaaaatggccgtgccctctaatgtcatakgaggtcagcgtatgaatgacgttgggtgcctgccctgcatatacatatgttctttgagctcattcaagggagaattcccatggattggcacaaccagtatggtttatagagcgatcaggaataaaataggttttcttcaaaacaagaggcaaaaatgtggagcccagggtgggatcaggggccttctgcagctgtcgcagttggaacatgtgacgaaagccagttgatgtgacaactgctgggtgggagggacaggcttgggggcggggctgggagggctccttcycttcctgacccagggatggtctttacttctccctggcacctgtagacctgtctttcttgtgtttcagatttgccatacggatgggaacaagaaactgatgagaacggacaagtgttttttgttgagtaagtgtctgcaaagaaaccactctcagctgttttgctttttaataggaatttttaattataaaagtaatacatagtaactgtagaaaaatacaaagtataacagtgtgtatctgtaatcttagcagaagtgactacttttaacatcgctggaacttttaacatcgctagatttattcttctattttccccgcacacgcatccttaaaaaaaaaaagtagggaggccaggcatggtggctcatgcctgtaatcccagcactttgggaggtcgaagtgggtggatcctgaggtcaagagatcgagaccattctggccaayatggtgaaactccgtctctactaaaaatataaaaatgagctgggtgtggtggcacgtgcctgtggtccctgctactcgggagggtaaggcgggagaatcacttgaacccaggaggcggaagttgcagtgagctgagatcgcgccactgcactccagcctgggtgacagaatgagactccttctcaaaaaaaaaaaaaaaaaaaaaagagggaatgcactgtgtggactgtttagtaacctgctttttccatgtaatatattatgagcattttcttgtatccatatctatttttcaaaaagatgctatttagcagctctagagttattattttgtacagatatactataatttatcaaattgcctattggacattaatgctaaattcctgttatagagaacctataattataaataatgtattgagcatccttatctgtaagactttttcacctctctgattctgtctttaggataaattccggtatcacgcagcaatagtaaccacctgtccaacatatagcatgagccaggcctgattctaatcatcttgtatctgtagcattaggtcattggatccccacagtgccctgagaggtagtattgttattatccctagcttactgccagtgacacagacttgagggggtaagtgacttgttaaggatcccacagcaaagaagtagcacagccaggctttgagcccagcacctgctccagggactgtactcttgaccaccgtagttaagaggagaattaatgtttcacaactgtcaacatttaaattagaagcttgaatagtctttgacaggattaggattggttggttaatagaagttgatttgagcaggaattttttttttttttaaagttatgaatgtaacataaacgtttcagtatttgattcaagtacaccaacatttaggggtcgggccagccctcctctgagtgtgagtccacttgcatggatccagtgtggtcttccttcccctaagcatgcctgtaacataacatctacaatttctactttcattttatgtgggcgaaagagtacctaggtgccgaggcaagagactgaaggcacaaactgtttcagtataataaagaaagtagttagaataagaatagtcataatacaggttagatatggagatgatcatggacaattatcaatcattactataaacactattaatcattagcttttaatattactctttgtggcattactaacataacctaggaataactggcatgtataggctcaggtgctaaagggacattgtgagaagtgacctagaaggcaagaggtgagccttctgtcacacccgcataagggctgcttgagggctccttggtcaagcggtaacgccagtgtctgggaagacacccgttacttagcagaccgcgaaagggagtctcctttccttggaggagtcagggaacactctgctccaccagcttcttgtggaaggctgggtattatccaggcctgcccacagtcatccggaggcctaaacccctccctgtggtgctgtgtttcaatggtcatgtacgttgtccgctttcatgctcctcccgtactcctggttcctctttgaagtacgtagtagatagtggtagaagaaatggtgaaagttttaaagtctttgatctttcttttaagggcagaaaagaaaatgctgacgtatgctgccttctctctctgcttcggctacctaaaagggaagggccctctatcctgtaatcacgtgacttgcttcaccttgtcaatcacttagaagattcaccctccttaccctgcccccttgtcttgtatgcgataaatatcagcgtgcccagccgttcggggccactaccggtctccacatcttggtggtagtggcccccaccctgggcccagctgttttctccttatctctttgtcttgtgtctttatttattacaatccctcgtctctgcacacggggagaacacccgctaagcccagtagggctggaccctacaactttaaggttgagcaaacacagtattttcaaagaatctgattgctacatcatttgggagttttatggtatttttctagcattttcactgtagttgattgaaccaaaactttttttttagctgcttgtctttgaggctctccaaagcattcgaccacattttcatagataccactgacactatttttcacctcccatgttatcagtttgtgtaatagtagcttgctggtaatgtagttacagtaacaagttcaaatgacwtgtgtgttttttgagcaaacctggtgaacttttggtgcaaaactgatattgagagcaaataggccaaagcttgcttgagagaagtctcccaggccaccataggcagccccaggaagacggggctgtctagcagttggataggtgggagtgcctattatttgttaaaaggctttttgcctaacttgtgaaagttttttttcctcaactaattaagggtatcaacgcattggttgtatgttgaaaatgttgaaaatgttttttttttttttccaagttttctttctttttttttttttatactgggtcttgctcttcttatccagggctgaggtgcagtgacacagtcacagctcgctgcagcctcaacctcctggactcaagtgatcctcctgcctcagccttctgaggagctgggactacaggctcatgctgccatgcccagctaatttttaaagactttttttttgtagagactgaggctcagtatgttgcccaggctggtcttgaacttctggccttcagcgatcctcctgccttgacttcccaaagcattcatattacaggcatgagcgaccacacctgactgaatttcttaaattttttatgtagtcaaatcaattttctcctgtgcagtctttgcctttgcattcacgcttggaaagttactccctgaaatgggtattaatcaaccaagagcagcagttctcaggcatggttcctggaccagcagcattaatatcacctgggaattcaataaaaatgtacattcccaggcccccaccccagacctactgaatcagcactggggtggggcttgcaatctgcgctckaatagtcatccaggggatcctgatgttccctagcttgagagcctcccgtctagagcaggggctgtctcctttgcctgtaaagggctagataatatgttttaggatttgcagggcatatggtttctgttgcaatgattcaactctgcctttgtagtgctaaagcagctatacacaatatacaagtgatgggcgttgttgtgttccaataaaactttatttacagaaacaggcagtgggccagatttggccagctcctggtctaatctagaggagtaagcaagggctttggggggaacctggaaattggctcccctggctagttctcacttttctgagcctgttgcagtggggtgctggtaaatgtttagcaccaggtcttcagggggaaaaaagccactgtttgtttccacagtataaatactttggccatagctgatttcatgctgccaaggtgaagtgaggaattgggaagagatagtcacgtttggctcttgtaagccagtttgagccagtctagcatagaactgctctgttgtgtgtgtataatattggggtcacaaattaaggttgttataaatagaatgaggatgaggatggtaataattagaataaaggttggattattactcttgagtcttggtacttatagggagatgagtatatattttaaactaattttacacacacatacttttaaaatatgaaatttcatctatatttagaggcttcttaatagtttttaagatattctgaggtctttatctcatatcccaagaatacatttaagatataaaaagtaaattctattataaggagtactcttttcatccatatgtgccttttttttttttttttttttaatggttacccagggtcttggtctgtcacccaggctagagtgcagtggcacaatcatggctcactgcagctttgatctcttaggctcacgtgatcatcctcctacctcagcctcccaagtagctgcgactacaggcatgtgctatcacacttgaaattttgtttagtgtttgtagagatgaggtctaactatgttgcccaggctggtcttgaactcctgggctcaagtggtcctcttgccttggcctcccaaattgccgagattacaggcgtgagccactgtgcccagcctccagtatattttaataccatttctacaagatttagatcaattccaaatcaaaatgagtgctcgtaggaggtatgagtgcagagtcttaaaatgaaaatcgttagaattttggtagttggcaggtttcttatttacaactaagactttatcattttgagttttctacttctctacgtctttaggcccttgcacagggctaagagatttaattgaaatctactgaaaagagtggctgacagatcttatagctacatttacatgaattacataaaagcccaaaaccttctcaagaagccttttttgagatctaaggatacatggcaatagttattgtatgttacagcgtatgttataggcagttctgaaggaaaggattcgatgactatctttttttggcacaaatgtgatccttctggaggccagaagatagattcagtgggccccagwtctttcaggtttaakgaataagcattttggtctatgaaaaatggggtttkcctaaagtataagattgtcttatatttataaatgcytgtgttcattgctgtgggttcactgctttctcttttgggcagccatataaataaaagaaccacctacttggacccaagactggcgtttactgtggatgataatcygaccaagccaaccacccggcaaagatacgacggcagcaccactgccatggaaattctscagggccgggatttcactggcaaagtggttgtggtcactggagctaattcaggaataggtaggctcttcacttmgttatttatctttgggactgctataatgagatccacttagatctagctataatggaattttgtttagtggttctctgatttaaacatgacttttatcyttttcagmtatcgtttcattaacatcactacctctttttaaatcctaatgttgtcatggaagcctgtgtaggggctgaccttgaagtctctgaaagctgaacactcagcaaaagactgtggctattttggtattcagggatgagagacaacaggctccgtctaagagtttttgacctggtctgcatggtgtatgggcatattccaattacctgggttattcaaaccaaaattgattggtaatagaatacggggaacaacaaggtattatgtctttggaacaaaggatactacaggtttcgactggtcactgagcatatcattttcttttgggcacaggatcttatttctctataaaattggagaatgagttcctgtcttcacctcttaattgccaatgtttacccacagggactatcatgggtagatggctcaagagggtatccttgcttcaatatgatgggccattaaggagacaggagcaaggcgggagcaaaccataactcttcataggattttattctgattttgctttgatctatttacataagtatctgaatcagtgagaaccacctgctttgagtttagatatgcatcttcagatttgtcgacatatgaaacgttgcatttggctgtcttctgtcaagttctctctgtccttttggtcccccgcagccctcacacggcccccttgatgccctcctctactcatttgtttctctttcctaattttgtttttatttttattttttgtgggtatataaaggtgtctatatttatggggttcatgagatgttttgatacagggatgcaatgtgaaatagtcacatcatggagaatggggtatccatcccctcaagaatttatcctttgagtgataaacaattcagttatacccttttagatattttacaatgtrcaattaagttattattaactataatcaacttgttgtgctatcaaatagtaggtcttattctttctttctatcttttttgtacccattaaccatctgcacttctttcttaattttgaacaattccttgaagctgcagaaatattttctagcatgattagggaggcacaggaggtaaaaatacattgttcaagggtcaattattgtgttgtacaaggtgtgaaatctaccaggttgccatccgagtggagaatttttttastgtacttgcctatgaaggtaaagaagcaaatggaaatttttttttaagaattgaaaggattttatttcaaatcaactctcatacctcatcctgggctccaaatatgttcaatccacttgtctgaacttctgcattggagtaaattttatataattgtcattgaagtcaaaactgatggcgtaatatttaaaacaatggctggatccccaatctaagaagaatacattttgttgatcatattaagtactgttacagtgaatgcatggacccatacaattgtggaataattaagaaaaaaggacttaagggcttaaaaatgtctttttaacaatttaacaagttagccagaaactttaaagatcttattctcttaatcttctagctagactctttttctgtaatgagtaagatatgtgactactgattgttttttgtgttaagtgttcgaactgctccatgtgacattagatagcagactcttgaatagagctaatgctctttcaaagatttgcaacagcagacctgcgacattgtaatccaggactgatagagttggttcagaatattaaaagggtgatatctagttagatacataagtcttgatggagaggaggagattctgaagcattgagaataaatttgtggttgctgagaatggccctcacatgttggagtaaagccagaaactctttgtgcctcttcacagctcccacttccccctaagactcttccttcctgatacctataattcattttgtggacactgcaggaggtgtctgcggtccagttggaggttgtggcaaattgtaacgctcaggatggcacagatgtcgcacaaggtcttagggagaccagcctttcctattcaagtgcccacagctctttccccagctgtcaccttccgcaggaatggcctttaacactgtcacctcaccccattcccctccactcttgggaagcatacgtctaggtgagtggtgaagatttttattctgmatttttgaaataatatcgtactgcaagttccaggcaatcaaaaactcacaaatcacttgcactctgcagcagtggtatcaggtctgaagaaaggaagaggctgcagataggcacatggctttgctaagttagcttttatatcctgcgtggctgccttagaaagtgtccttgcccaagtaggctgtggcttctagataaagtccttctactaagctatgaaacatgccaatttataaattgctatcactactttagttccgctcatttaaaatgaaatagctgaatgccgagtgagtgaattgggcatctttacttccaagacttctggggcattcaggagtcatattctatctaagctttaatggtgttggtgttccctttcctttggccactcaagggagcctgttttctttggataaaccgtgaaatctttaaccctgtgaatgtccgttttctctaaggcggggtgggctgaaacataacataacaggatttattttgaaagtggtgactccacaataaaaacatagatatctaatttgccttacaaaggccgatttgcaaatctagtatttccagtggttctttctttctttctttctttctttttttttttaaatgccccatatgacgctgctttgttggaattgccattggtgaggatctcactgataaagaaggggacatccctcccttgatagactttagggttgcactagagccatgccccctttgaagtggcctctaagcaaactctgtcttgtcatcattttcctctctgcagctgtaagtgatacggagctgtattttgagtttttgatactgatattactaaggcaattggagggattcttaattcatctaaaaaaaatcagggattctgacagataaaaggatttggaggaaatgtcagaataaagcattgtgggttcatgaagtcctaggttttataattaaggtttataggcaggtattaccgctgctgactggattcaactgtctggattggagatgaacaaactgccatctctgggctaactctgacccactgcctgattttgtaagtagaattttttttggaacacagccatgcccatttattcccattcctataatgttgaactactgtttgtgtatattcagttatcccaaaataatatggccctttgcttgttaccagaagagtcgcccagttgtggcagagatcatctagctcgcaaaactgtaaatatttactctttggcctttcccagaaaaaagtgcsgactgctatgttagatactccagttcattcaaagtgatatcaccctaacattctctaaattagccacagcttagatgaaatttaggcaaatggaaygccccaggccccaggaagactgtggcagcacattgtatgtaactgttggggatgttgcctgaaacccccsccytttttttaggcagctgcaaggattagaatgttgcctcctcagaaactaacactcttctctccttgacctttgtttaaccagctttctgaacctgaagaactttgtagattgaaagctgtagcttgtggacctctctctgtggagatcagcatctcagtatccagggggaagccatctcttcacccaaagcttccgctaggagatcaagaggcccggaaccccgcagtcctgaatgctaaccagtagagacaagggaggaattcatttctgtttgtgttcaacatagactgagcaggaaggrccaggtgttttacgactctttggagttagcagcttgttggctctgatttggtaaaagcaacggaaatgccttcagcacggtgaacrttacatgcaaatgttgggaagtgttaggaaagggaatttttttaggcgagggaatttcgcattgaggaaggtccctgcttcgtttttagacacagcctatcagtcagctaatttggctatgcatataaatactttagtataaaatgctgccccctgctacctgcaggctgacatgttgctcatcaaaggcaggatccttctaatgagggattagttggatgcctaaatgtgggaccacctactctgttcattgtcttaattagctagatgtttgttggagcgcatgcaaattattttctgtaagcagacagatttattatcatatttacggagtgacatccagggtttgtgagacatccattaaatttttttttttttttaatgtttgagatggggtctcactgtgttgctcaggtgttggtctcaaactcctgggttcaagtgatcctcccaccttagcctcccaaagtactgagattactggtgtgagccactgtgcccagatgctattagcaagtatgaacaaattagatattttcagtctactcttctgtggtaatgatgataaaacttcttaactttcagtcctaaaccagcagtggctaaaacttgatttttaaaatttttttcagagtttggtccagatgaagtttctttcaccttgcgaacctttagaacgctgggctgcatcatgtgtgttgtaactttaaagttagaatagcctagcttcgttacagtttttgagccaaaggacccattaacagaaacaaaactttttttcctgcaaacaaatacaagctggccacactggtaaataccagtgaaatatattttgggactgacacttgcattttctattggtacttatgtcacaaaatcacctctctaacgtgtattacatggacctatatatatgcatacttacatatcaaaatgtatatattttgaggtataaaaagtacgtgctcaaggtattggtcactcctcaatttgttttccttgaaacaaaatgaaggtataaatatttcagccgggcrcggtggctcacgcctgtaatcccagcactttgagaggccgaggcgggtggatcatgaggtcaggagatcgagaccatcctggctaacaaggtgaaaccccgtctctactaaaaatacaaaaaattagccaggcgcagtggcgggcgcctgtagtcccagctactcgggargctgaggcaggagaatggcgtgaacccgggaagtggagcttgcagtgagctgagattgcgccactgcagtccgcagtccggcctgggcgacagagcgagactccgtctcaaaaaaaaaaaaaaaaaatttcatgcagggaatcccaaaatgtaattatagtgtgatgttgaaattgattgtcttagcttagagagcctactttttaaaacttagggtcttgtttctaaatcatgtgttgaaattacagtgtgaactgtagttgccatactctttgatcctacaaattgtcaccacgatgaattcatatcttgtgcaaattttaccagttctacgtgaatagaagaaaattactttttcttcatgtagagaagggtattcattcctaagattttaaatccacacttcccaattatggactacgccagcttcctttacacctttgcttctttgttttcttttccatacctaaatgttactaaattttgcctttgagcctaaagcatgtcattgatggtttttttttttctagttattccaaaaggtcccataaatctggggccatagctaacttacatttagtcattttcatgggtaaaacacactcatatgagatcattgcacttgggatcttgaaatgcctgattagtttcctttctgattgttgaccagacttaaactagtgggatcttggcatttatctttttaaaaacctggtgctcattaaggaaaggaaaatattctgaaataatcgaaataaccttttgggcattggaactccattttaaattaaaaacatttgtgcctactattatcttatgctaaattatacccaggtattgtaagtaaaattattttgaagttactttgttctaagaaactatggagattcttgacagtgttagacaaagtccttaaatgacattatataaaaattgagaattagtaccttatgacttaaccattttacactgagatattattggacattgagtgtacatggaaatcacgtgatcaaagtatttgagaagtaaatatctaaaggaagagaccaatttaaaacattctaatgagcatcatctcataatttggtaatctcatgtaaaatgcttataataggggtgtgtgtatgttatatatattttwaaaataaatttgtaatcatgtatacagtagtccccccttatccgtggtgtttcagtttttttttttttgagtcagagtattactctgttgcccaggctggagtacagtggcgtgatctcagctcactgcaacctttgtctcccagggcctggtgattctcatgtctcagcctcctgagtagctgggattacaggtgcacaccaccactccctactaattttatgtttttagtagagacaaggttttgccatgttgtccatacaggtcttgaactcctgacattaggcaatctgcttgcctcaacctccccaaatgctgggattacaggtgtgaaccgctgtgcctggcccgtgtttcactttttgaggtttcagttacctgaggtcaacaggcatctgaaaatactaattttgagagagagagagtgtgagagaccacatttacataacttttatacagtacattgttatagttctattttattattattgttgatctcttactgtgcctaatttataaattaaaatttatcctaggtatgtatgtataggtgaaagcatagaatacatagggtttggtmctatccagttttcaggcatcactgtgggtcttggaacgcatctcccgaggataagggggggctactgtcagtgtgaacctgattagatctcaactgaaacttttttgtcacatgaggccatcagttgaatttcatgcctgcatgtaggtttagattttaattacttttttatggtgtcagcataacaaatgagagtcatacaaactattgtttaatgacaaagtgggtcaaacccataattaaaaaaattaataatagatttttgttctacttgaggttttgtagcattacgtaaagcttgaaaacttggaaattgttttacttaaaacccaattaaaataatttgatcttttgcttttacatcatagagtggcacaataaaaattgtaatggaagatgttattttacattttttttctttttttttttttgagacggtgccttgctctgtcacccaggctgtagtgcagtggcgtgatctcagctcactgcaacctccgcctcccgggttgaagtgattctcctgcctcagcctcctgaatagctgggattacaggcgtgagccactatgtccggctaatttttgtatttttcgtagagacagggattcaccatgttggccaagctggtcttgaactcctgaactcaagtgatccgcccaccttggcctcccaaagtgctaggattacagacactagccaccatgcccgggggtgttgtacatatttcctttaatctaaaagcagaaccatctttatatatttttatttttttccactagagggctctgttgccctttgatataattaaacaaaagaggcagcattgcaatatagttctgttcctctcagtccatcttgctttcattttggttaaataatgtcttttacttttctaacatatcttttaggtcttctaattctctgtgatgaagttcaaactgaagactgttactagtgtcgtgtttgtttctttttctctctcttttgttttgtttgtataaaatgccrgggatgaagggatccacttaataaaaaggcccattgtgttcagggagcagcctgttctgccaaatcacacaagggcatgtgttttcatgacattattgcttttgagtgtgctggcctagcaataatatgatttttttttcctaagtggaaattgtaatatttaagtattaatacctctgtttaaggttcattttgaacgccttggtgaccctatgtttttttctttgttttttgttttgttttttttttttttkttttttttttttktttttttgagatgaagtcttcctctgttgcccaggctggagtgcagtggcgcattcttggctcactgcaaccttcgcctcccaggttgaagcaattcttctgcctcagcctctcgagtagctgggagtccaggcacctgccaacacgtctggctaatttttgtatttttagtagagatggggtttcaccatcttggccaggctggtcttgaactcctgacctcatgatccacccgtttcggcctcccaaaatgctgcgattacaggcgtgagctactgcacccgcaaccctatgtttttttctaagaatatagtgtcccttgccccctgctacaagccttacccagtgttacataatttattgtaattaaattgtttattaatgatacattcttgctgtagaagaaaacgtgtccttttgggctcagtacagtatatgtttcttaagtaagagggatcatattaaaccagctacttaatgtgaagcagatagccagtgttctccatgtacaatcttagggagggtaatttttgttttggctgtgtaattatggtttgaggcagcccattaatcgcatatttcagctgtcaaatagaaatttggcccagaaaggaatacactttggctttacaaaactgcttattttcaaatttttaaatggggacaaaaacgaatatgctatattatatacttttatttatataatttttttttcagcaactttttctcttttgaaaatgcaagagcctgaaaaacattgtgaatatacttgtaacattgcaaagctatttcaccagagtaaagatattttggttgttcatatacgagtgtgttcgttgtttatctaataaattgttaaaactagatggcgattctgggaattattatagacttcataataaataagatgctgacagttgaaacccccttgaccgttgcctgtttggtatgacacagaccttcttggacttttgtagcctatacatgagyagatatgaatcctcagccttctccaaaataaggttggggtcactaggaggccttcttggaaagatgtcttaaattaaggcaccagtagatggatcaaaaagcaggttccaatagctcgcttttagtttcttgcctaaatttgtgatctccctttggcttcataaataacggtacatttcatgaagagctggtctcagtctacacaagcctaactgaatggggtrcataggaagggttgcattgtgtgacaaggtttaaatctaattgttttaagtctttgagttatttgctcaccaggctgtgcttgatggttttactttttgtgatttttggagccttcatgttagaagccatagtcatatggtgctctctgaaagcaagacaaggtttcttcactasactctaagaggagatctgagacagagagatgggggcggggaggaaacctatttcagtgtctctactatttctacctaggtggaggataactagccagatgaacggagctaagccttttgtatgaagtttatttcwtataaagaggaacaaaatcagaatcaaatttcttctgtagttgcacagaaactgaagttaaagctaatacaatgtttttcatttttacccttacctctacaatgtacttaattgttacagattcgtatttattgattatcatrttgtattacattgatagccgtttaaaatttatgaagattccgtacttgtcatatttaattctcagcaccgtgcttacagctgtcttgtgataatgtcgaaaggaaagagaagggaggtgaggtaacgtgcttgagatcatacaggtcttgggcggcgggtgcctgcaggatagatcaaagggtaattgagtctgtgcctggggccccttccactgtacatgccaccatcctgttgggaggaataacagcacactcctgaatgagctctttctaagcagctcattcattttgttaatcctgagtttggaatcaaccaatttatttaaacccgtgaagcctcgctctgtgcccggtcaagtgctgggagtggcatctgyggggagggccaaggcagatgtcatttccagactgcattggatcctggattcagaagctgaagcttaggagtgggcatggtggttcacgcctgtaaacccagccctttgggaggctgaggcaggaggattgcttgagctcaggggttcgagagcagcctgggcaacatagcaagaccccatctctaccaaatcaaattttttttaaaagctgaagctttctttaccaaaaccactttggtattatgattgtaaaacaaacattaaggaataagtctgggggaatgggaagtagcattcatcaagcgcctgtatatgccaggtgttaggctagattagcttgatgtgccttctcatttaatataagtaattattttaaaggttattgtgattaacatgtattccttatggaaaatttagaaagcgaagaaaaataaaaayaagaataaaagatttaaaaaaaccccaattcttaccagttagaagtatactattaatatttagcatgtatgattgtaagcatgttttcccttctttcgtgatttttctatttaaattgtgattatctttctgtgttgttaaatactccacatcttaaatggctgcatagtattccattatgtggttccagctcttctcccagtgtggtacattcgggtggtttccagctttttaatagctgtggaatggagaagcacattttgtaattaaatgtttgtacccatccgtgactcttctatagttttattttgtggaagtggaattgctgaatgaagtgatttgctccccaaccttaatatcttgatttgttttgtcaaactgccctggaagattgtaccaatttgaatgctcctttgcccagcatccttgccaaacttgagaattagaatttttaaaaaatatcacttaaatttgcctatctctgatgattagcaagattgataggcttttcttatgtcgggccatttgttttttaacgaattgccctttcatcttatatgcatgactrttggatatgtatcgattactaattgattgcttgcctcatgtgctatmatttaattttcaaaatgtcccttagaagttaatttataaagtgtctattactttaagtacctgttcaatcctgtgatcaagaggaaattcacagagaaagaaattggcctaactcctcagtttgcttcactaaaatcttttaagcacacatcttgtctattatgccagctgcaactcaaatcaaaggcactgttgctttggtacccgcatttaaggagggaataccccaaaaaacttaaacttgtctggctttgcaatggtggtggagtcccaagatgacacagtaggcaagatttgattactttggttatgcaaatttcccctagatcttctattaatgacagtaacagcgcttcagagcttttctatgcattctctcatttgatgagcctgctttcaggtggagaaattgtaccattgctgaaaatagcttcgctgacagttagggcaagcttcattggtagcaagtttctatctggaaagatgtaggasaggaacactgactctggaagcagacgtgacctagttttgaaacctgggataaccacttcctatctgtatgacccgagcaagttactttccttctcagaactcctgttccacctctgtgcaatatggacagtactcctactttgcaaagttgttaaagatgggaactccagagtgcccagggaattgtctactcatcattgcaggcgtttaataacgtgtagccatttctggaatgggaggcaagaggatcgagttaccagtgaaattagtttggtattttcctagcttcctggttcccagatcctcaagaggctgccataatctctgtgaatttgtcctaaaatgacctgtataaataactgctttagacactggcttgtctttggtatgaaggaaaacattttagaatttttttggctggaggtcagtagctttcatccagaaaagaataatcaacggaaaaaaaaaaaaaccaccgagacgaggttatttttgttacagtcaaggaacaaaaagggatatattaaacttgggggaaaaagagaaggaaaactattattctttaaaaccgttataccatgcatcatggtaacatcttttttactgagagttctgcattagcacacttgttcacccaagtttgtgatagtttataggactgcctggtgtattaagtagaaatgctcaactttgctgtcctatttttttgatcatatccaaaaagtgtcagtgtttgaatatagttttattgccacttaaaaaggtaggacagttttattggcgtctactggacatggtaggaagagagctgtaatttgacacagattgtccttaacttgggtgacttaaggcaagtcacttaaccatctgagccttaatttcctcgtttgtaaattcaagagaataataacttctctgtcacatactgttttgtacagatcaagtaaaacaatgtgtgaaatgctgtaatgaagaagtccaatagtgtatgaatataaggttgctggcgtttggggaaaaatcatagttatagaagaaagactcctaaagggaagattagggttggaagaagatggaggaagagagtaatttaattccttaatggaaagaataaaataagagctcttgacttttttttkttgttgttgttaggatatggggagaggtttctgcaaatatcttcttcagggtttacgaagtgaaccggatgtccggtaacagggttgcatgtcatgcaattgactgggtggtgatgactaaaattttaatgatgcgatctcatttaaagttgacaggctctgactctagccagatattcaggagcagaaacttgattcaataagaagggaacctgcagaggcagaaacttctgtgggttgcagttgtgttgagattacacaggtggaaatgttgcgagttcttgggtgatgcgatttcttcctgcttgccttaagtttcacctgcccaggtccttacttctgctcacagtgcagcacgaatttagatactgattggggattcagacacaaacgggatgctccttgcttatataacatcaacagaattgctggccacatcttgattatagaaactctttttcctggtgatcacacaaagcaaaagaatgaaaataatcaatctctttcaaatggagagactccgctgtgtcagccaccattggctataaggatgaactctcaaaactttttgtatcttgcaatataatgtcttccaactgcctttgattttactgtgtggctgtgtgatacagcaaggcagctgtggcttctaaattcagcagctaggtttgagaagcttctatcagctgagagatcatcagtacattccaaatggcattaaaaatgctgttacagctttatctattagcaaaggaagtttcaattctaagttcacgtacagttactagattgagtgtttgacaaggtagagagctctgtagtagatccatatggggaacatctcagtcagggtgtggagtcagatttttggcaagggataccatcctttcagcctgaaaagctgacttgggagctgtcagcctgtgtgcacgaggacctttttcctcccagggttagcgtcgccacttgcccagtgtttcttttttatttcctgctggcctgatccgggagggatttgggaaagctagtcttgttggtgtgtcatcatcgcgacgctgttagtgattgacttacccgagtgtacacatgtttgcatctcacttgtatgttccttacatgtttacttaattattgggaaggtgtattaatgtcctgttgctrctataatggaccaccacaaactcggtgcttctatgctgcaaacctaagattataggcagtcataacacagtgttaagtatttgtgtatctaaacatagaaatggttcagtaaaaatacagtgttgtaatcttatgggactgccgttgtgtgtgcagtccattgtcatgtgatagtgattaagggaggtggacatttttgtgtttgcttatttccataagctcaagggtaaagcttcccaatcagcctttaggacagaggtaagaactggttggtggcctggagcctggatctggcctccagatgttttttgtatggaccacacaaaaatggtctatagtgggattttttttctttttttttttgtcagactacttgccagcatactaaaatcaggatattttacttaaatgtagatttatgacagttttgaaaaatcagaatgagtattgkagactaaatgtttatgtcttccccaaaaattcctatgttgaaaccctaatcttaaggtcatggtatttggacatggttgtgtccccactgaaatctcatcttgaactatagttcccatgatccccatgtcttgtgggagggacccggtgggagataattgaatcatgcygttctcacgataatgagtgagttctcatgagatctgatggttttataaggggctttcttcccttttgcttggcacttctcttactgctgtcatgtgaagaaggacgtgtttgcttcctctcctgccatgattgtaagtttcctgaggtctccccagccacgtggaactgtgagtcaattaaacctctttcctttatamatttcccagtcttcgatatgtccttatagcagcatgaaaacagactaatacaggggcctctgggaggtgattagatcatgagggtggagccctcataagtaagatttgtgccctgatgagaagaggatagaaaggtagctaactttccttaagctatgtgaakgtgagaacacagtgggaaggcagccatctgtaactagtaggagggccctccccaagaacgtgaccatgctgccaccttgaccttggactttaagcctccagaactgtgttaaagaaatgtctgctatttaagccactcggtccatgatattttgttgctgcagcttcagctgactatggcttatgtctatcaaggaacatagttgcactgaggttgaacagagctgttcctataggctgaccccctgtaggcaggcacaggctattttccatggtcagtttacctgcctgcttcctgtagaggcttgagcttggtttagagtctgcaatgaaaactgtgtgatgatattggactcactggctcatagccactgccacgcccttattcagtcttttgtgcaattaacaaacatttattgactactgagtaccaggtgctaagacttcagtgtagaaacaggcagggtccctgcccttgtggaggatacaaaacacaccaaaatgcagtcagcttcactgaatgacagagatatgatctgagaagtgtgtcaggcagtgtcatcgttgtgcgaccctcataggatgtacttacaaatcctacgtggtataacccattatacacagaggctgtatgggatagcctgttgcttccaggctgcaaacttgtatagcatggtacygaactgaatactataggcagtcataacacaatggtaagtatttgtgtatctaaacacagaagtggtacagtaaaaatacagtgttgtaatcttatgggaccgccgttgtatctgcactccattgttgaccaatgtgttgttatgcagtgtgtgactgtaccagcagcttgatctttgtgcttctagagaacatttaaattgattcgcttttgtgagacagggtcttgctctgtyacccaggcttcagtgcatcagcgtgatcatagctcactgtagcctctccctcctgggccaagtgatcctctcacctcagcctcctgagtagcttggactacaggcatgcaccaccattcctggctaatttcttttgtatttttaatagagatgaggtcttgctatgttgcccatgctggtcttgaactcgtgggctcaagcagtccacttgcctcagcctmccaaagtactgggattacaggtgtgagccaccacatctggcgaaactctgggtagtttctaattatttctgtatttctatttgtatttaaaagtacaggatactaaaatgttttttttttcttttttgagatggagtctcactctgtcgcccaggatggagtgcaatggcccgatcttggctcactgcaacctccacgtcccaggttcaagcgattctcctgcctcagcctcctgagtagctgggattacaggtgtgtgtgccaccacgcccagctattttttttgtatttttagtagagatggggtttcaccatgttggccaggacggtgttgaactcctgacctcgtgatcctcctacgtcggcctcccaaagtgctgggattacaggcgtgagccaccgcgcctggcaaggattttttttttttcatacttgaggaaacatctaacagcaaatatgttcttataagttaaaaagaacttttgctattttgaatgacactctcattaagtcttactactagtctctgatttttcttttttctttttctttttctttttttttttttttgagacagagtctcactctgtcgcccaggctggagtgcagtggtgctatcttggctcactgcaagctccacctcccgggttcacgccattctcctgcctcagcctcccgagtagctgggactacaggtgcccgccaccacgcccggctaatttttttgtattttttagtagagacggggtttcaccgtgttagcaaggatggtcttgatctcctgacctcgtgatctgcccacctcagcctcccaaagtgctgggattacaggcgtgagccaccacgcccggccttgatttttcttaacctttatttccaattatgcatcttctgagtaactataaagaaaagcaaaatctacrgtaggtatggagtgagtgcagagtcaccatcagcttgaacaaatgtgtgtatctgtggtcaagtttaattgcttcttctgtaatttatattaatcacgcttccattgcttgccttttgttaatacgtatgcggccatgtgatgattttttaaaaggtcatccagtatcttgatgtccagtccatgcttataacctgagcagtttatgtactcttgagatggtatgtgctaaaaatgagtagctagtctgagtggcagccttacccattttattttgtgggcagatttcttttacagttctggctgggtttcttttagttggcttctttgctttgctcctrttacgacttagccctgtagctctgrgctcttcgattctcacgtgctgatggtgtagctgagctctgctaatgctggttattaatctgacaatctataccagggaggttttataattgccataattcttatttgctccattccatttcccagcttctcaaatggggtggcagctgcaaagcacagtatttgaacatgaagtagagaatcgtcacttcagcttatgattttacattctgtcaaggctgcagggaaagcggtcatgtttctggatggtatttggatctacaaattccaagcaaactttttacttcttattatgtaaaatggaagggttagccaaattaagatctcaccatcaaccttgagggagtgacttctacatgccrtgtattactggttataaagctagtcttgtttggattgaagaatttaatcatatttaacttttcaaaggatgctttttaaaaaaccttatccgcgtgttatgtttaaactgagaagtacctgaaagtgaaaattttatttatttttactttttttgaaagatggagtcttgcactgtcacccaggcttgagtgcagtggctcaatctcggctcagtgcaaggtccacctcctgggtaaaggagattctcctgcttcagcttcccaactagctgggacaacaggtgtgtgccaccacgtccagctaatttttgtatttttawtagagacggggtttcaccatgttggccaggctggtcttgaactcctaacctcaagtgatctgcccgccttggcctcccaaagtgctgggattacaggctcacgccaccatgcctagctgatttttgtatttttagtagagatggggtttcaccatgttggccaggctggtctggaactcctgacctcaggtgatccacccgcctcggcctcccaaagtagtggaatcacagacatgagccaccatgcctggcctgaaataatttcaaattaacccctgaggaacaaatgctcatgactttcaatgaatagaaaaatcaractgctagaacctccagactgcatgtcatgcrtagaagtagaatcctggggaagctagctcacaaaagcaagggagatacctgcaaggctgagctgagcttgcaagggaagaaaaatattagagagttgtcacatttagaaataagtgattccaaatttacagtcaatggactgtagatgccttccatcttcttaagagattttgtgcctcttgcacaggtattatccctaagatgtgttttcttcaatgtacctagactgtttccttaaagaattgcttttgtatggtacggctctatgtgtctgtgtttctcatgttggttaggagaactaacccttgtgacgaataagaaatggcaaacattgttaatgttgactttactagttgctcaaatattagcattggattttagagtcaacatgctagcaggatggctttattttaaaaccatgtgatagaaagctatctgctattattgatagcatttctggatggctgtcagaagtctttctttagaaatttaaccatatttttaatggtgggcattgcagtcaacaatagtacagactttgcaaagactattttttttttggggtgcagtgaatacttcgcaatgcctgctgaattttacctattctgtaagtctttttgggaaccgttgagcccctcttctcttagttgcctttagcctttgtttttattatgacaattggtatgaaatttttccttttcattacttcttttattcagagcacacctctggcttatctcttcattctctgtttagtttcatattttactttaatttctgtacatcaatatctgccattatagtatttaagctcttggaaacatcaggcatttgttaacttgttgagaaaataaagcactccactgttgttatgagctgcttatggcaagtgaaaaactcacaatatttggccaaacttgggatcatttaggtgttgtttgcaattaatggcaggagatattttccttgttgttaagagtataacgttggttttagaaagcttgatctatgtttttctccatgttagatgtgaaaagaaccaggagagtgtgaggatattggtaatattgtcatatggtgatcccactgtggatagatacgcaagagagaaaatccagaagaaagcatttcactgaagcctggggacatttctggtgacaaatggtgctgatggcacagtgagaacgggagagggcagaagcaatgcacagatagaaagggtgtcacctgcgcattgaaaaatcccagtgccataacaatgcagtccctgcaatacagacaaacctgactcccaccattcctgtaaatgaagatggggccttgctgagaaatagaggatgcagattccaccctcaggcttcccgtcttgggatgcagagaaaactcacccacgtgcaacaactcaagagtcgttatttacctagcaaagtgttcacatgacagtgtttgaaatgtaccacgtgccttttcatgtttagtttagagcttgacactagagctctactgtggtttaccaagtgtgagggactatttctttctgagaaggaggggaagctttagtttccttgaatgtctaatagagtctgagtttccttttagaagcataaaagacgtacagtaggcagaatctggatttttaactatacagttgctgaagttatcttcaattcaaatcttctaaattcaattttgttaatgttgtttagatattattatagaagccagctttactgacttctgcacatttaatcataggagattcttccattctgtgaacttagatttcttttttctatccatgacatttatctaaatcaggctttcttttctttctactaaatttttcaattaccaataggctatgagaataattagactgacagtattactgaaaaaaaaacaaaacaacaacaacaaacaacaaaaaaaacaccttccactaaaactgactcaaaaagataatagcagggaaaatgacatgtcgrtctgtgattccttttttacttgtcagtccttttgggagttgaacatataagcacatgtacctctatgtgacttttgagacgtctagaatagagaattcacctttgtagctggaatttattcagcatgcaaatgtgggtgggtgattgttttatagatgcctggtgttgaatgatgggcagttgtgataactatatataaaattatattaaagtccaagaggtgcttttatgaggcaggctggaaatggcatccgattttcttatggctttttcatgtccattttgatgaatctatttattacttctataatgagtagtacacatggttggttagccaagttattgaactttatcaaccttggctgaaattcacaatgcgtgccaaacttgttgtaacatgtaagaaattacatctgggctaaaaggttcaataatgattactcttataatggaatcttctacaaagcaagggatttcatgatatscctatgcttttaaaaaattattgtgatacagtgaaacaaggaagaacgtgtagctggaaaaatagtatttgcttgtaatatacattcagattcataayaggcttatttgattcccaggacagggtgagcaaaggatgctgtttcctgggtgtctgctttggtgttcattgagtcatgtctctctctttagaccttactggatctagtcttcatcatggggcctgtgagctctttcaaatctagaggacaaaacctaataaagtgctgtcatatcacatctgtttatgagtttcaaactgaaatgaaatgtgtagccgtgttattcttaaattacagagacttgaggaacgtagagctttttactctcactagagaaatctaagcacaggttggttcgttaacctgtaaagagatgtttgggttttaagaggtctatcaaataacacagtttccctttcccaagttactacctaactgagcagtaagaccacccattaggcaaatggaagaccaaaacatcacctgagtcattcatgaagctgatactggagaatatgtatagctgtgtgagctggtgggctttctaatcctgaccaccacaattagacagggtaatgggtcagtgctaggtcaggccagaccttcgcagagggcagaccccattcatgcagcatgttcaagacagtgcaggagagcagggtgtgtgctctctgtaagaggagaggagaggcagagctgcgtgtgcccggttctcaatcctggaattaccattcacataccattcacaacataagttggatcagctcccttgagcaggaataagtgagtggcagagggggtcagggatgttaacgcaaatggagatcccttcacccagaaagacacatctgaaatggagaagatgcytttttcctcctgcaaccaataagagagtgatgaaaattatgacgccttgggaaataagactgcaacgtaaatgtgtgtccaccccctagttttcttttggattgtgaatcctcaccctccgataactagacgtgctgttttgacgtctatgctttccagcttgccaattctggggcctggcacagtatctttcaccccggagtctcagtttcctcatctgtaaaatgggaaccatgacgtcrgcatcacagagttgtgagaattcgacaaggtggaatgaaagcaactagtgtggtgtctgaccgcttgtgttagtccatgaggaatttccttacgtattgttttgtgtctaggaccaagttcttattttcttcttatggatgacttcatatatatgccgccacagagggaattaccgtttttctttgtaggtaaaaaggagctgggttaagatgcaccgtcatatgaaacagggaaaaagggtttgcttgggttttagattcctgaaacagtctgctgagggattctaaagttgttgtggtctctgttccactttgggagtttgataaaaattggcctgttttatttgacagctcttaggtagtgtgcaaaattgtcaacagataataaaagttttttgcaaagctatggctctatgtgctgtacttgagcagtatccatactcttaatagaattgatatatgaaagcaggtctttttccttatccgtttagacctaaatcttatccatagtgtgtggatatcacaaacagcacaagaggaagtgaaaggaacagagtgggtgagcaaaccattgttcaaaggaaacagaacctcgctcaaggaaaatgagaattcttctgatcagcttctataatggatgcaatgaggaaagttgtctagcagactgttcttggccaactgtctaaatggctcgctgcatcctcttcacgagagctgatggtaggactgtagaagagtcacaaaacatcacatgacaacgccagtccctctgataatcctgcaagagccagcccagttttgctgacagcacagtctgctgtttaattattgtgtgttcaatgacttacctctttttagtttaattraaattatttctcagattaagagccatgctatgatgcttgccaacggatatttaaaacatgtaactgatttgttttttrtaatgcttcaggagaactcagttgagcagtaaagatgtgctcgtgatgtggttagctcagaataaggatgtgaaaaccaaaagggaaaggaggacaggagtgaatctggcacttatctttcagtggggcctgagtgcaaattcttcctaccttccatatgagagaatagggaaaattaaagaataaatgtctctgggtttaatgcaactttactaaggaatgaaagtccgataagaatccrtatcttttgaaagaagattttttaaattccttatttttccttcctgcatggtcataaaacacactggggacagcccaccctgagaagtcaccaggcatctgcctgccttcagtagcaatcacccaactgctgtagaccgtaatcaagctttcaagaaccacgtgcagcacgctgcgggagagtcccagcgaagtgcttaatgcgccactccacggatgtgagtggggagcaagtgctcaaaatggggcttctgaattgcaatcatcatttggcatctctattacctacagctgctcaaagatgttccccccatgcaactgtttcttgcaactcctaacatttgcaacgaggcctctgatgcagacaacccgtttatacctctgggtggttgaaaccttcatggtttgttgtaaagaaaggtacacagtcccaccaatcagaccgtatctagaatattacgttcatttaggggtggcgcatagacaggctaaaggatggcaaagtcattgggtcatgtcctaggagcaacccttaaaggaagagtgaatggctggttagttggtagaagaaaagatttatgtaaattagttctctcagtagctatctaggagagagataatcctagctttcttcaagggacagaaccaggaccaatggacagaatctgcaaggaggcagcatttaactgattagaattgtcgggggtggggttggcgagagggtgttgcttttctaatgattcacattgtataaaaagcagacagtaggtctggcactgttggctcatgcctgtaatcccagtactttgggaggccaaggcaggtgaatcatgaggtcaagggttcaagaccagcctggccaacatggtgaaaccccttctctactaaaaatacaaaaaattagttgggcgtactggcaggcgcctataatcccagctactcgggaggctgaggcaggagaattgcttgaacccaggaggcggaggttgcagcgagctgagattgcgccactgcactccagcccaggcgatagagtgagactctgtctctaaatacataaataaataaaagtagagagtaagttttctgtattgaaaatgttttaagagttctttgtcttaccttaggttcctccaaaaacagaaccagagaaaaagacatatttatgcataatttgggatgtgattacaaagagagggatggggaattcaggaaggaaggagaggcaatataaaaatgtgttttttagttagtcattactagaggcaactagtgctcaactccaggcactttaggaaatgcatctcatagctgtctgcctgcggaataaagggcatttatccaccggcttctgaccccgttggacaagggcgtcccataagttttgatgtcccagaattttgggtttgcacatgtgcaagtgccaagcaggttcttgtaggcatcccatgctgcagagtcagagaatctctaggatggaaatggggggatccatattgtagccccaggtgaggccatctggttgcatttgtgtcaagttggttgaaaactgcatggtgggcgtaaaaatggtttgagtaaaatggagctgtgagaatttgaaggggtgcatgagaggtgcccgatacagtccaccccctgcaccatgctcaggtctcttaagagtaagcagaatctaccacagtgtatccttaaagttaaaaggctctctgatgggactataaatgagtcccagtttgatgaattctggggctttagccttttctgctgtggtattagttttctggggctgctgtagcaaagtaccataaactgggtggcttgggacaacagaaatttattgtttccaagttctagaggctagaagtctgaaatcaaggtgttggtagggccatactccctttaaaatgtgtagggaaggacccttccttgcctctttcagcttctggtagccctagatgttcattggcctgtggcagggtaattccagtctctgcctccatctgcacaagccattctccctgtatcttttcacatcatcttccctctattactgtttgtctctgttttctgatctcctcttcttctaagggtgacagttttactgggtgagagcccaccttaatgccctcagtttaactcgatgacctctgcaaaggccctgtttccaagtaaggtgacattctgaggtactgggcttaggacttcaacatatctttttggggggacacaattagaccaatagcaactgtgctataaaagagatgttgctttttatcattgatgctatccagatgcatagcaatcattcaacaagtcattcgaaagaaataggtatttcctgagggtctagtatgtaactcagctctgctctaggacctggtgattacagcagtgaacaaagtgctcctgcctacgtgcagcttactttcttatggagcatgattttcagaagtaattgttcttttgcctcgttatcatcagacattaggaaccaaggggggattgcctgcttttggatcacagagcaagctgccttgagcaagtgagttcgaattgcaaaggtgtttaagcatagcttggtggctgcttagtgaggatgttgcagaggcaatttaaatgccgagcagggctttgggtttgtgatggttaaagtccatttccactgcggagatggtatgattgtacaaatggacaggttctgggcctctgtctgttttgtcaagtatacaacacttctgtttatctttaaagggaacaaatagtgttttcacaggtctctgcttaaataaaaagattctagaccactggatgtcaaccccaccatcccccttcttttttttttttttttttttgcatcctgtactcctttgagaatatagtggaacctctggcccattctacaagggaaaaataaatgtattcctagccaggcatttgtgtacaattttgtaggggaggaaaggattgttcatagacactgaattaagaaatccctacactttatgggaattgtaatcattagtagcagttacgtagacatacttccattaaatacacatacttgctttagagagtgtgtttattcataaaaattcattgaataggattaggaataaaaatatgcatagaaatatttgttactttttcattgtaatggttttttttggatagaaatttatcagtgtgtaattaataaagtagtattgatttcagaattatacggtgctaaacaatggaaatttcctaaataactggcaggtaatggaaaaaaaattcagttactgacagcctgtcatagttgaatctaagagctaggggcaaaatacatatattctatgtagtttccatttctagaccctggatttctaaattcttccttataaaattttaaatttcttttttttttttttaaagatggtgctccctaactgatttccttcattttattatctcataacagatttgattttcacaatgaaggtaattattaaaatgcttcctttggtagtcaataaatataattagtttaagaaaactagaaatatttgttattagaattaggtgaacatctaagagtcttatttatggaagcaacatggtcaatatttatggaattgagttgaggctttgcaacactttcaacagctttttaaaaagcaaaatagttactgcctctgtggaaatagaaattacccacctattatgtaatgaaaaactaatgttggtttacttaaaacaaaactgtgtagcagtgtgttatagccacaggaactcctcagccaaatgttaagttaatgcaatgaaaacatttgtaaaaacattatcaagctgcaaaagaactagaaatgctagatactccctagtagctgggtgttcaaaaacacttgtcattctcacagttatatttgtggtatcttagtggtcattcaccttggatgtgattcctcaagtatgccagaaaagcatcgtcttgtgcaagtgttgtatttaggaagaactttgtgtgaaatcatgattgtgggtgaataactttaaataaataaatcgttttccttgatatacaatattgtgctactttccacagaaagatggaatcaatgctcttgactgtaatggaggtttacagtttttctaatttcttatttaggctgatctgagcaaagatgttcaaatttccacttatttaaacaagatagagtttttgctatgttgaaggaatatttttagcttagtaatttacttagaaactgccttattcaatattcgatgttaaatttgaactaaaacacatagcatcatatgacatggagtcttacattcacattttgttggactggaaacagaatcaacatattagtcatcttaattcatttaagttggctttctccagaattctagaatccaaaaacaacacatttgtcagttttacacacaaaaggagaggcaggatgtagtttatagttaaacatccagctttgcaatgaaaagccaatgtagctatagcacactgaatgaaattctgggtgaaacaaactgtgtaataagattttgatgcatattgaatacttagaaaatttgttttatatttgttttaatgagattctctttatatctgctttcatagaaacttgtaaattgtctaaaattaaattttctgtggttgtcatccacatgggttctgaacttgctgttataattattcacattttcttgcagtgaaaatctacagrtcaaggtcatcttcacgtctttagttcttgttttgcttcaggtcastttagaaccgaatgttaaaaggatattgtctattcgaagggtcagattgtggcacgtggaccaaatccagccccccgaggcccacttttgtaaatcaggttttattggaacacgggtgctcatcgtttacatatcgcccatggctgctttcacatcataacagcagaattgagtagctgtgagaccctatggccagcaaagcccaagatatttactgcatttatttactgtatttatgtttattctcttgccctttacagaaaaagtttggcaacccctggtttattctgttaacatgtttcctatataaggattcctctaataagttttcagaattattaagaaaacaaagctcattcctctaaaagaattggtatgtttttttttttttttttttggtggtggttgtttaatgaggaggacattataaagtattatatttcgtttccttaccttggttgccaggaagctcagaactttaaacattaaaatgtttaagtaaccagctcacttcacgtttcggatcagctttctttttcttaacacggggatacattttcactttaaaaaaaaatcaactttttgaagcataatttacatgttgtaaaacccatacatttaaatcatacacatgaaggtcttgacaagtgtgtacacacacataaaccaccaccccagtcaagataatagaatattcacatctgtaagaaattttccacctgccccttggctcaggcaatttgtcagtcttactactgattattgcgttattttaaaaccctgggttgtatgcaattgtctattacaagctgttttaaatagttttcggtagtggctggggcactaatgattaatagttgaatagcacagctggagaagttaagattcatttattctatttagtcttcagtacaaatttttaggtttccatgggagaatctgagatacagctcacatggagagccttttagctaatgtagcaataattaataagctggatagcctgatagcctgatgttttattagggtggtgcaaacgtggtttttgccattactatatatatatatatatacacatatatatatatacacacatatatatatatatatatacacacacacacacatatatatatatatatatatatatttttttttttttttggagatggagttttactctgtcgcccaggctggagtacagtggcgcgatctgagctcactgcaacctctgcctcccaggttcaagcaattctcctgcctcagcctcccaatagctgggattacaggtgcaygctaccatgcccggctgatttttgtatttttagtagaggtggggttttgctgtattggccaggccagtctcaaactcctgacctcaagaaatccgcccaccttggcctaccaaagtgctgggattacaggcgtgagccaccgtgcctggcctgccgttacttttaatggcaaagataattcttttaataattaaaatttgaaataattcttttaataagaatttgctgcttgccaagagctctgcagttattttattcaattttcctaacagctcttaagagtacatcttattattcccctttcacagatgaggaaattgaggttcacagaagttaagtctattagtttgctagagctgctgtaacaaagcaccacaaattgggtagcttaaacaacaaaatttattgtctcatagttctgtaggccagaaggttgaagtcaaggtgttggcagggttggttccttctgaggactgggaggagatacctgttacaggcctctctccttggcttgtagatgagtgtattagggttctctagaggggcagaataggataggtgcattaatatttatgaaggggagtttattaaggagtattgactcccacaatcacaagctgagggacaaggaagccagtttgagtcctcaaacctcaaaaatagagaagccgatagtgtagccttcaggctgtggtcaaaggccccaagagcccctggcaaaccactggtgtaagtccaagagtccaaaagctgaagaacttggagtccgatgttccagggcaggaaggatccagcatgggagaaagataaaggccggaagactcagcaagtgtgttgttccatcttctcctgcctgcttttctcttggctcgctggcagctgattagatggtaccaacccaaattgagggtgggtctgtctctcttcatccgctgacttaaatgttaacctcctttggaaacacccgcacagacacacccaggaacagcaccttgcatccttcaatccaatcacattgacactcaatatyaaccatctcagyaggcttcttcgtgttcacatagtctcctcaccgtgtgctgtgtccagatttccccttttcataaggacaccagtcctattggattagggctcccccattatgacctcatttatccttaattatgaccataaaggccccatctccaratgcagtcatgttgggggttagggcttcagtgtatgagtttgggatggcaggggagcagttcagctcgtragaatcgtaagattcctgatctgtttctcttccaagaaattgtttggtttcatgttgattttatctccttttccctatctgtctcaaagcactgaagaaaatcaagtcccccttgccctgataaggactttaaaatggtgtttgctaaaatggtgtgtgcttaggggcagctttgagccagataacaattctagttgcgcatgcttccataagctgtttactctaggaaggagaatctctgttgggatcttttggggagtacttgcctcccaagtgcttaggctcccgctgctgacaagaccctctgcctggsaagccstgcaggttggaatcctctgttagggttccaaagccttcaccaactcagagctctttctctctctgtttctcttttttgaatttaaattgatcctagtcacaatgttcacattacctatgttggggatcctaccaagaccctctttttggcccagaagcagcagcggggtgaggggaatgaaacaaaaatttatagctgtcgagtctccagaagtcatgtaaaatcagcctcagctggaagctcctccgtgcatccctcacattcacacaagcaggtgcctgatcacagctgatggttagattacacgtttcctgagaggtatagatttcaaaattggtgtatttcacccgtccctcatcatggtatccccaaacaaaatgttatcaaatgaaraactccttcccagctctcccttctgagtgtctgattttattcaagctcagatggcttctcagatagcktaaaaagtgatggagaatttcttttaccaattgtatgccctgtgggaacctgggtgctgtaatcactgaatatgttataaccaaaaaggtcaaactcgcaatgattcggtgtgttttgttccgtgcatcctggcatgtgaaagaagtgaggtaaagagtayaatttacttccttgttttaaagctagcattgcccrtgccttccacgcgggactgttgtggatatttgaccactgcaagaaaactcacagaagcagaaacttagggcttgctttaaatgttatcagtgtgaattgagatggtgtcagcattatttttttaaagaccaaaacaacaakagtaacaaacacacacaagccactgttagattttacaaaactttaaaaagtaattatcttaaagatatctaagatagtgatctggttacatagattatcagagatacttttttttttgattatcagagatacttttaaaaaagcaactacaaggtaaggattatcckttaatttagtgtttttctattaaactcaatttgctttaaagttttttacattttgcctcttttttgtatgtttgagtaccacttcctaaccaatcacaataaatgtccggtttggagttggaggagtcattgattttaggcaaggtgatggtgagcccacagagcacagagttaatggaactctggccgttgatgtagcttygaagcctgaatttaagtcatatttttgaaaagttgcgtcttaaaaagttactagcgatggagaatgaaaagtcaatttggacactttaaaagtgagcctcaaaaaactgctgaattttcccaacattgtgttttgagcacttccacgtgactttggtagcataaagactttagtcttttcaagaggcaaagtaatataccacttttcgcttttttaatggtgagagccaaggtcaatctgaatttttctttttctttcttcctttttttgtttttttttttttttwwwaaaaaaaaggtgcttgaattagaaaggtagcacaytgtccacatggacagtgcaggatggggctggctttttcatttctgagagctggcaatggaatgaaggtcttttttttttttcttaatttttcttttttaaacaattccctcctaagcatttcttaattgacaggggtggaaactatgttgccaagagggatcacagcccttttggtcattaagaaagtcaaggaacggggtctctttggatgagtgtgtgcgtgtagaatcctggtggctggcctgcttgctctaaatcataaagaaccctgtctcgagcagacgagaaagagtaacggaggcctcaatggtgaaaggaaatcctgtaccagctgtgaaaacaatgagacacrttcagtaatagaatatagtgtgcttacaaattcagagttgggttcccttcttctcttgaagtggctataaattaattcatcaaaataaaaaaggccaaacttcaggataaatctttctacttctaaacaaccagaaacactttggttgtcttagtagataggagtgtgagtacagaattatacgaagtgagaccatgggtgtgtgtgtgcacgtgtgtgcgcatgcctgtgtgtgtcattgsttagttaacaaaaggattgccctctgaagaacatgaacttgggccagacagcacgtgtagggggtggaattatggagcaattgttactttcttgtattaagaagaaagggagcaaaagagctgtgtcttcttgagaacctttaaaagacacagaggtctctgcctctaaaaagctccattacatttttttttttaacaggaggcctaaattttttatgttttattttgtgctgttttatttttcttcctaaggttctcagacaagtttataaaagtgccatgttggctgggcagagtggctcacgcctgtaatcccagcactttgggagaccagggtgggtagatcacgaggtcaggagatcgagaccatcctggctaacacggtgaaaccccgtctctactaaaaataacacaaaattagctgggcatggtggcgggcgcctgtagtcccagctactcgggaggctgaggcaggagaatggcgtgaacctgggaggcggagcttgcagtgagccgagattgcgccactgcactccagcctgggcgacagagcaagactccrtctcaaaaaaaaaaaaaaaaaaaaaaaaaaagtgccatgtatattttgattacaaaaaatttcatgcggtgttactttctttttattggtrgagggtctttatgttttatttttttgagacagaatctgctccatcactcaggctggagggcagtggcaggatcgtagctcactgtaacctcgaattcctaagctcaagtgatcctcctgccttggcctcctaaagtgctgggattatactttgagccactgtgcctggctggcctttgtgttggacgttaatacagttggttctttaaagtttgacagtgaagacttttggaaattaaagaaaaaaaattgagtataacttgtaacggtcatggtgtaaagatcattttttactggttggaagtatagaagtggggttaaattaagtctataattgtaaactattgatgttggaagaacatagagagaaacttattcctgtggactggtgatcccatctcacagcccttacagataaatgtttgtaaaagcaaaggacagtgttaattctgagccccaagatgaaatatcaagtaaaagagaagaacatttgccaatgcatcactgtctgggaatggattccatacagcaggtaggtttatgtaatacagtagctgaagagacctcaattctgtgccttgatgggattacaccgaagggagcactggtaggctgttgatgaaacaggtggtatttggaccacttctccctctttcmggacagctgcttagtaggtttagcttaaattatacacatgccaagcatgtacacatatgagaagcctatatctcrtaatatccacagagaatagatggcaaatcccatgatttgtatttgactgacagtcaagaccctgtggggtgtgagcctggtgggggcattccaggctggtttctcctgcctcmaggagctgcttctagtgtgtgctcttaaccctaaaggaaggaaacactgtgtcttcctcttctctcatacagagcccttcccatgacmaatgtgtggagtgttccctccttttacgtaattctccaattttctggaccccagcttggtgtcctacaattcagttttgacactaacgacccagagtcagcacagaccccatggttgagggctcagtcctacaggatcatcccctacttcaaatgccagtagcaagttcaagattgtcaagtgcacttctgactcactggctacaaattggggttcccacgaccatctcctcaggcttgataatttgctataatggctcataaaactcagggaaatatttacttatgtttacctgtttatgataaaggatattacaaagagtacagatgaagcggtacatagggccaggcatgcggaggggatgtggagcttccataccccctccyggcatgcccctctccaggcaccacatgctcagcaatctggaagctctccaaaccctatcgtttaggtttttgttgttgttgttttgagatagggtctcgctctgttgcccaggctgcagtgcagtggtgcaattatgcaatcatggctcattacagccaggacctcccaggctaaagccatcctcctgcctcagcttcctgagtagctgggactacagttgcacaccaccatgcctggctaagtttttttgttttgtttattagagacgaggtctcaatatgtcacccaggctggtcttgaactcctcagctcaagcaatcctcctgcctcggcctcccaaagtgctgagattacaggtgtgagccactgtgcctctccatttaggattcttagagaggttttgttaccctaggcatgattacttaaatcattggccattggtgattaagtcaatctccagcccctcctcttcccccaaggtggggaatgtgggggttatcaattattcacaactctctaattgtgaataataaaagactctcccctcacccacattgctcagaaaatttcaaaggtttttgtttttttagacagggtctcgctctgtcacccacccaggctggagtgtagtggtgcagtcatagctcactgcagcctccaacttctgggctcaagtgatcctcccacctcagcctcttgagtaactgggactgcaggtgcatggcactgtgctccacaattttttttttttttttagagatgggatctcactgtgttgtccaggctgrtctcaaacccttgggtttaagtgatcctcttgcctcagcttcccaatgtgctaggattacaggcatgagaccccatgcctggccaatttcaaggattttaggagctctgtgccaggaacctggatgaagacccartatgtatttcttattatatcacaatatcacaaatscacagtcacatggtgattgtggtagtktggggggcctgatggtggggtacacctgcttgaagtcaggctaccatgcccattggggtcctcccccttttttgccctctgatcttgtgagttccttaacattggggatcagtggtttttctcttacatgaaatgacaatgacactttatagggtttctgtagagaacaccttagaattagttaatgtgtttcataaagcacatggcgtggtacccagccaagagtaacactctgaagtgctcctccttacctggacattacagcatcctttgtataaatcaggatgctcaggaaataccttgtttggaataggaataggctcctccctttttttctcacttgccttgattgctctgtattaaaattcataaaggcycatgaattatcaattagatagcatttggtttgttatttttagtttcttcctatagcaggcatgtatgcatgtgttaaaaatggaagtagcgtcgacattatgaaatgcacaagaagttttcctgcccccaaccggtaactctctcctgcagtaatcaatgttggcacctgtttaaccacttttgtgtcttacgtgcacgctgttcggtactttgactttttttcttaatattataacatggaggccaggcgcggtggctcacgcctgtaatcccagcactttgggaggccgaggcgggcagatcacgaggtcaggagatggagaccgtcctggctaacacggtgaaaccccgtctctactaaaaatacaaaaaattagccgggtgtggtggcgggcgcctgtagtcccagctactcgggaggctgaggcaggagartggcgtgaacccgggaggcrgagcttgaagtgagccgagatcgcgccactgcactccagcctgggcgacagagcgagactccgtctcaagagaaaaaaaaaaaaaattataacatggaaatgtttccttgcatctccgtatcatttctcctcattctttttaggtgtaacacagtattttgtcctattcatgcaatataatttatataacctaattgataaaacattttggttgattgcagtctgtcgtagataatgccgtactgaatattmctcccacatatttgcaagtctatttgtaggataaatttctggttgtggctgggtcaaagagcatgtccacttcaaatttgatagctatgtcccaactgcccccaaatatgttaagccatttcctatcccccatccctcattaatctatgaagttgcctggttgccccacatctttaccgacaggactgccgctcaatgtagttacccttgtagaatctgtctgcatgtgcctgtctaggaccatgttaattgtaatctttgggcatttttctcactcattcctaaccaggactgtcactggcaggttaaatgagaacttattcacccagcacagtggcagcactagtagccagcctggggtcagtcttgcctctcgagagatctcatgcagtcaactgggatttattgtacagctttacaaaacattacggcctcagccttgtactgcccaaagcatgcagatgccgcctggtgtattttaaagatattccacatgaactgacccgtttcccacttcttgagttggtatgttttttgattaatatatttgagatgtatttatgttattagggctatttaggaagctctgtagggatttgttgcttgctgtatataacacatacttttaaaaagcagggctggctatgacttatttttctctagagagacctgtgtagttttgtaagttcttaagatttggcagctgtggatcgtgtttagtaagcacgatctctaactctttggaactcagaactatgtaattgaaatggcctgggaggcaartgtgatcattcaggtaatcaaagtaactacagaaacagaggtatggattagctagtcattgcagatgtggcattgagcatatargcgtggtgtacwtcttagaacttcatctggaaatgcctgtgggggagttggatttcaagatcatcgtcaatgtcatgtcactgtaatttcatttacattaatcagattagtttggaaagtatggtcttcctacttttaggaggatataggagaaactcatccttaaagatagtagtctgttaatacaaaaacagtccccacatttgcattgtccccaaatctaacccaagctgaaagacattaggcctatcttcttgctttatgcataatggcagatctccagggagggagaggatgtgtgctggaagattctacaacttgttgattggttcctaaagatsgttttagtgctatgtttgtggggcggggctggagggggctggaaatcaccatctctgtggccttttaattgtgcccagttacaagtaacatttgtccccagtgtttcacaattataaattaataataaccacccattagaaattacgggtattgtaagccccaactcctttgggcgtcttaataaaaatgataattaaaaccataatttacagtaaatggggacactgcccaagtacatccacaatatggagaaaattaaaaaacttaaaccagaaggaaccttcctggcatcggggaaagaagctgcctttttcttagctcctacctctgtgggagctttgtcagtatttgaggggacagrgttcccaccttcatgttttttgtgcctgaggattctgtgggcgactgtccccacctgtccagcctaccagtgagtctcatggtgtgcggctgcctgctccgatgctctccaccaccatgcccaagccatttctccctttgtgttccctgtctgggtaaacaacttgccaagctcaccagtggcccacagggcaccttggacacctagacttaggcagtccctggctttgtagattttttttgcttcctacatgattttctaatttataccttgagctgctcgggataagagggcacctcgtccatttctggctggtcacaaggccacagtatcttgagcgagtccattgtgaccactggaggtactgtaaatggataaaataataatatgaataataactcatagtgtttactccctgcctaaatccacaggctcccgctgcctacagaggagtcccacagttttcgcttgcttcatggagcttcatctctgttgtattcatgtgatttatttacacggagttgctccccaatccttgatctttttttttttttttttttttgccaagcaccctgcctttttgcttgtctgtttcgtctttatctctccttccagtaaagttcttggcccagaggttctgctgccactcartgacatttgtgaaatgcaagggagcttgcaccatgggttcaagctcctgcagatccctgagcctgctacccttgtgcttctctgtccacgcaaagccaagtgctactgcggggttttccaaggcatagctagcatcctaatagtctcacacttgacakagtagggtttgacatggtttaaataaaatctcaaccagatcagtgggagatgttctttgagattcggtgattgagttgtgaacrtatggactgagggtgttttgtggtaaggcttgagtcatgtctgtagcaaggatgtttcctgrataatgtgcactgagcatcaagtgcctgcagtggcctggcgggtaatgccagcagcacgggtgatgatcatggtcaacatgaccaactagaaagcccaaaccccacctctagctgacagtggcttctcagctaacctgtcacyacgtgggattgggcccccagtggtgtaagctttttcagagaagctacacatctagcttttggacctgtgatctccccaatgttttaatgctggcaactaattcaaattaggaaggaaggaaggaagagaggttggaagggagagagagaaagaaggagcaaaggagaaaagaaaggagagaaggaggaagggagggaggaaggaaggaaagaaaaggaaggaagggaaagggaaggaaggaagggaagggaagaaagtatgggccacacaaaacaggtctgtgggcttgacttgtcctctgatcatcagtttgtgacctctgttctaaagagtgaaaactatgtaagatagtatmagataagtaggtatttaaattactttgcaccttttccatttcatagaacttgaatgtttgtgttcaaagcttaaaacccaagacagtgagctattaagcctccatggccacgtcatttttctgattgcatctgatgtaacaagtgctagaaaaactgatgctgttcattgctttaaaacgtctttctttattttcttggtattattaggtttacatattcttccgaacacactcttgccatctccatgcagttaagctagttcaatttaaacattgtcataaagttaattttttataagatgaatcaggttattaaatttagtaaaccattgccttcattattttgcacaaactttggcactgtgcagaataggcttagcactactacatttagctaattaaactggccgtcagctgcagtattacaagagtgagggatgttattctcttgggttttatccaggactttaacagtaggtagcattattaagctttttttatataaaactccacactctagagatatggtttactataaaagtgttattgtccttcctgttaaactatcatcttttgaaatagccacgctttgtttctgttccaaaggcaattgtaaagggtaagaaaatggagttgtctattgcagcttttaaaagtagactagcaacgggtaatgcattgcttagataaaggaagatgtaagaaccagagtgtaatttcacaagacacagagacagatggcttacccgtaactacagtcaggaattctctaaaggagagagggtggaagcttgagcctgtagcctgttgctgctgtcttgtcagatgtgccctttctggtaataaaaagtcctttgccgtgggttattttgtcaagtgagatagcaggacttaacaggtttgtttgggaaaataaaatytgatagaaaaacggcatgcttttcccccacagatttcttggtagcatcattcaaaactacagtgagcagtatctttgcaggattttaatatttattcattattataaaggaaggaagagggccatcgtgttgcagtttgaaacagcctggattgttttaaaatagtccagagctgcagcctattagcagtctgcaagaaccatttgtttcttcagcagatatttattgaatcctactgggtgctagtctggcgaaatacggagattggagggtgtaaggctcaaggagcttacctgagaaactggataaataaagctctgtactgggtgtggtggctcacgcctgtaatcccagcactttgggaggtcgaggtgggtgggtcatttgaggttaggagttcgagagcagcctggccaacatggtgaaatcccgtctctactaaaaatacaaaaattagctgggtgtggtggcacgcgcctgtaatcccagttgctggggagactgagacacgagaatcgcttgaatccctgcggtggaggttctagtgagcagaggttgcagattgcaccgctgcactccagcccgggtgacagagtgagactctgtctcagtcagtcaatcagtcaatcaatcaagttctggaacctgcctggccttgtgttatatcgatgctttctcaatctgttaaaaacgtagctgctattgaatgactaagaattgtttactctcatttccactctctkacatcttttttttttcttttaataccctgtgatgaaactgtgaagaaagatattcctgatcattgctttgacctggaaatttcaaagggacccacagtccaccattccgtccaagatcttctgggtgtgtgaagtcccgggctcacaaatgcagttgtgtttggtcactgtgttgcttgcatatggctgttggcatctcattagcctgattgatggggcagatcagtcagcaagactttgttcggtgcctgcccccagccagctgggctacaaaacctggcattttacttctctcattttccccaaatgatctaggtgtcttttgctcactggtgataaggggtgacattggtatcacaggtaaaartgagtaaatttgagattattgtcgtcttgctttaaaggttggagatacagcttcaaaaaccttttactacccacacacccaaggggagtcaaatggatttaggtgttaaatacttcaggtttgaaatcctttgtgcattatttcagcatctgatttaagtatcagaggtcatctttaggtaataagtaagtattttggaatatgggatttggcaaaatctcaagaaataatttcaggttgtctcagcaatgaggttaaattgtgctccagagtccatattcagacaaacggaatggtggagcccgaggttgatttctttgaattctggttggtattaaagtcattcagccctcgggttaccattggtagcacatctaggagcaagttttaattttttagtcatagtgactgtgctggatttggtaggtcgtacgaattgggkaagaggcataggacaccaaggattttgcaaaaagcaggcaactaacatttgttttccacctactatgattatgttaggctctcaatatatgtttaccacttattccccattttacagaaacgataactgagtttcacatgggttcaaggcgtgaccttagatcccacagcttgtacgtgcttagaactggcagcaacacaagtgtgtccaacttgagttttcctctgtgctatgctgattttccttgagaagtattctgtataaatagactgttttctatgaagattaggcctgtgggagtgatatgaatgaatgaactttactaggctctttcacatggtgatgtcaggaagataacggtatgctgattttgcgtgcatattaacattatcttgtaaacaataatttatggccatttgacatgggtttggctgaattgcatagctgccttctctagtagaattgactactttgttattgtactgtactctatagggtcttccaccacagattacaaaatatggtattttttagtttagagcaatgggttggtgttcaagctctggattagactgcctcttctttttcctccctccctcccctcccctcctctcctttccccttttttgagatgactttaaaatatagattcatattttttaaatatacagaactttttcagttttccatttcttcttgtggcaactttttttgtagtgtttttctaggaatttgtcttttttacctgtattgtaaattcattggtataaagttgttcaccatatcttaagatcttcttagggttcataggatctgtagtccttttctttatttttcatttttaaaaacaactttattgaggtatgattgaygtacaaaaagcctyacgtatttgaygtatagaacttgataagtttggagataagtatatacctgtgaaaccattatattttataagtacatgatacaatatgagcacagtactatatggtagatctctagggcttttccatctggcgtacctgaaacttcataccctttggctaatacctccttgtttctctctcccctcagccctttgcctacaccattctattttttgcctctatgagtttgagtgtcttagattcctcatataaattgtatcatgtagtatttgtccttctgtgtctggcttatttcacttagcataatgtccttcaggttcatccatgttgttgcaaatagcagaatttccttcattcctaaggctgaataatattccattgtgtgtgtttgtgtgtgtgtgtgtttgtgtgtgtgtcttccacatttcctttatccattcattcatcagtagaaatttaggctgcttccatgtcttggctagtatgaataatgctgcagtgaacatgagagggcagacatattgttgtgatcctgatttgagttcctttggatatgtatccagaagtaggattgctggatcataatccagcaatttttaattcttgtttcgttttttgaggaacctccatactgtttttcataatggttgcaccaatttacattccactaaggaatgtaagtttctcacgcataagggggctcttgtttccacaccctgaaccacacttgttatctttcattttatgatgagaaccaccttaagaggtgtgaggtgacatctcactgtggtttcaatttgcattttcctgagaattwgtgacagtgagccccttttcatacacttggctatttgtatgttttctttggagaattgtctatttggttcctttgcttgtttttaaaatctgtggttttttttttttttttttttttgctattgggttttaggagttccttatatattttggatatgaacactatcagttatgaggtttgcaagtattttttactattttgtagcttgccctttcagtgtcttgattgttttctttaacgtgcagaagctttttagttttacgtaacctcacttgtctagttttgcttttgttgcttatgcttttatgtggcataatgttgtccttttattcatccctgatattggttgttcaagccctctctttctgtctctgtctctctctctgtcattcttgctagccctttatcaattttattagttttttcaattgacagacttttagcttctttttttctctgtattttatgtttgttttagatttataagtttctcctttctccttttatttccatcgttctgctttctttaggcttaatttgctgggttattttcctaatgtaatggatgcttagatcatcttggatgcttagatcatcattttttctttctttctttttttttggagcaagatctcactctgtcacccaggctggagtgaagtggcatgatcatcctcctgagtagctgggaccacaggtgtgcaccaccacgcccaactaattttttgtagagatggaattttgccatgttgcccaggctggtctcraactcttgggctcaagcgatccacccgcctcggccaccccgattcctgggattacagccatgagccactgtgcctggtcttctttttaatatatgtagttaaggctatagattttcttttaaccatggctttagctatactccttaagtttgtatatgtgtttgtaattaccgagtttaaaatatttctaactttcattgtaattttttgagccataatgtcttatttatttatacatatatttccagaaatgagaattttctgggatcttgttattgatttgtaatttaattccattgcggtcaaagagcatactttctaattttaatcttttgaaattcattgagacttgcttttgcccctgcaaatcatcagttttggtaagtattcttgaagtacttgagtatattttgctgttgctttcagtgtttatcatattcaattattttcagtttatcaattaagttgttcaagtcttctatatactttgtgtttgtctgcttattttatctgttactaagagggatatgttaaaatcttccrttataattgtgaatttgtctatttattgtcctaattctgtcaatttttgacatatatgagaggctctattattaagtacatataaatttagaattgtcatgtattcttggtggattgaaatttaccattgtgaaatattcagcactttctcttgtaatgcttcttgctttagagtcttttttttctgaaattagtacagctatatcagatttcttttggcccgtgttatacagtataccttttctattcttttactttttttatgcttatgtttaaataaggtataaaacataatgtacattcttttttaaggacagtatatgtatatttatgttttcttcagtctgacaaactttttcttttaattgccatctttaggccatttatatttaatgtaatgacagatatatttgagtttgggtttaaatataccaccttattattggcttcctgttaagttattctatattcctctttcccttatttctatcctttctttctcttttttcttttcctttttcctttctctctctctctctctttctttctctttcctttctttcttccatttaaattgagacagggccttgctctgtcactctggctggagtgcagtggcataatcatagctsactgtgcccttgaactcttggactcaggcaatccctcgacatcagccttctgagtagctgggactaccggtacctgccaccacacctggctatttcttttttaattttaatttttgtagagacagagttttgctatgttgcccaagctggtcacaagtgatcctcatgctttggccgcccacggtgctagaattacaggccactgtacctagtcatcttctctcctttcttgcctttttatcattctgcttttcttctccattagctttttaaatttgtagagatttacatcttgcatctttgacttattaaaatctaatataaatcagtattatatcacttcctggagaagacaagaaccttaggatactttgcttccattactcacctcctaggttaagcattgttattattattgatatagtaatttttgctatatattttaaaactcacagatttcactcttaccatttggrtcttaacatgtcgttaccctttatgttgctctttgttactttctgcatctctgggtttatagctaaggtcattttcctcctgcctgaagagcatcctttagtgtttcctctagtgtgggtctatacgtgacactaggtgtagtgtaggtgacaaacaaaaagcagctttcgtttgcttaaaatttttgttctctgcctttatttttcaaraatattttcactaggtatagaattctaagatgaaagttttatttkttttcagctgtggcttccatcattttcctgagaggtataactatcagtcttgtagctactggtctctaactacttctaaaactatctgcagtttttagcagttttactctgatgtgccttgctttgacatgtatgtgtatatatgtgtatctacacacacatacacacatacagatacacactcacatatatatttctgtttgcggctcacacagacataaatatatatatatatatacaaacgtacatttctgcttgtagcttgcacayatatatatayacacacacacatacatgtagacacacacatttatacatatacatgtcaacacatacacatacatatttctgcttatggctcaggatacttctttttttggccgtgtatgcgtcattgattttgtaacattatcagccattctgtctttaaatattgcttttcttagtctatttcacttgttttggaactcagattacatgtatgtgtaagagcctgggagaatgtgtttcatatgtctcttttgtgctttgttttattgtgttatttttttctttttatgcttcactttggatttttttgttaacttattttgtagtttcctcaatcttgtcgtcagctgtgtcttgtattctgttaaactatatgctgaattcttctttactcttattactcttattttgtttaagtttcagaatatctatttgaatttttttattgtttctaattccctggcaaaattctccatcttgcctttttgttccttgaatttgtcagtcagacttattttaatcactgtttctgaataacttgattagacagatctcctgtgcatttatttccatttgttcccctctggcttttggtgaagttttttctttttgtatgcttagctattttgtttgaatgtctgagagtttatatgagtatttgaaataatcatagtggtaatttgagactctagataatggtatcttcctccagagaacattttctcttgcttctggaaattggatagatagggactgatcactttaatcaaactaggaattgaaatggcctgaagctgagtttccactcttgtgaaggctggactgtctcttgttattacagcgagggtataactctttaggatcccgaccmaaggtttggtgtgtttaccgtggccctttcctggtgggtcctgagctcaaatttatgtctttttccttgttataaaattgccaaaagctcagcccatcttctcaggcttccaaccactatgtttggaaatgaaatatgccttgaaggaaaaaagctgccaaatgctggccttgcagtttttgcagatcttggccccmaaaattcttagtcatagtgcccttctgatgccttcaaacagatatgggtgtgtatgcacgtgtgttattttgtccatcttttctaattgttctcagtaggaaatggggctaagaaacctaggtaacactggtagaagcagaggtgctggcgacacttaccatagagtagagcataaagtccttatcgtgggcacaggatctggtcattattgatggttaaatggctggacatgccgtgaactcttctatgtcccagtcttcatctttgaaatcactgcatccctaggacaagttttctcaccatcacagtgttgacagtccgggccagatggttctatgttgtcaggggctgccctgttcatggtaagatgttttgtaatgcctggtgtttacccactagatgccagtaggactctaccccacaacygtggccactgaaaatgtctccagacatttgcttctgtcccctggggatcaaaatcacccctggttgagaacttggggtaatttaagtggtgctccggtaaaggccattcaacwtgactcactgtgttgatgttatgttttctaacattgactttcctttaaaccatagggttcgaaaccgccaagtcttttgccctccatggtgcacatgtgaycttggcctgcaggaacatggcaagggcgagtgaagcagtgtcacgcattttagaagaatgggtaagygcttgactgttgttgttttttttaattgtcaaatacacatgccrggctaaccatatggagatttyagtggagtgtgtaaagtttattgctcttggaatcatgtctttatttttaaagtcatcttcactttgtttgtcttatgaatgaaagcatgagcaagtcmattattattcacgcatttgtttgtagttcattgtcagtgtcatctgctttattagtcaggggtttgagaatgtttcttcctttaactcatttattaagaaaaataaaacgtggtgaacgcccatgattgcaactaggagactgttatgcttatggttgttaagattagaaagaaggargctttaaccctatctctratttcttacttttctctgtctatgtagaagttgatgttgatacgtgtctacataaatatttactaagggcttgcmttagtcttgggaccaaggatatagtattaaacgaaacagaatccctgccctcataggcttaccttctaggtaggaaaaatagaccataatcaagtttaatatttgccataatgtcagtaaataaaggactgtaaagcagaggaaggtggggggaatgatagcgtgagtgtgatggagtcatcagcagggagccttccaaagttgtgacatttgatctgagacctgaatgaagtaggggtaagccatgcagatgtcaagagaagtattctcttagcagtgagaagagcatatgctaaggctcagaggtaggcacaagcctggagatttcaaggatcatcagggaagctagtgtggctggagatgaatggagtgggtaggagaggtgctgttgggggatgggtatctggtagactctgagrtagcggtgaggaagacattagagggtttgagctagagagtgatgcgagctgtttgatttttgaaacatcgctggatttcagaatgaagtccagactgcattcattcacttttcattcattcacatattcatgaagtgcacctctgtgatgggtgctggggtctactgttaaggacaacagacgttgccactgtctttgtagagctttcagcctattgtggaagacaaatttagtcaaaaaacacagatcttaatgtaaacttgaaaaagcagtgagtggtcctaggaatcagtaatgatgccagggagttgggagacctttggggtccccaaggaagaagtgattgaactaagatctgaagaaagacctgaagagggtggagaagggtcagatggggtaggggaatggcaggtgcagaggccctgggaggagggggaggaggagatagagcagcgtgtttgggagcagagcctgaagggggctgggtacaccctgtggaggccgtcttcatttttgaatgctgtgaaagatttcttgccatttgaagaaatagactacagtgtacttaagaaaatttttggtactctggactgaaaagtagtgaaaataaagaaaaggaagatttatttctgctttttcagtgtatttatgatgaaatatttgaaattcagtatatttgaaatgagcccttatcttgagctcactgagcttattattttgggttaaataaaaaagaaaacagagtcttactttttctgatcmttttattgtctttctgactaatgttaaaaagtagtaacctctagtaggtgggatagtagcaatttttagggatgtattgagaagagtacaaatgggaatacgtgcatcttatttgaatctacacgcagaatgggaaggtgaaaaatgaaatgtgaaagtcgttcttggtccttctcttggaagataaacattatgtattcttccagaaaaaggttatctatataccagcaaacacactcacattctgttctgtactttttttttttttaaacttagtactgcaggagatctcttattagtgcatatagatctacttcattgttttaactgctgtataatattccatcatgtgcttatgctataaccagtcttccctttggtggccatttaggttgtttgcattgttttgctatttgttattccaagcaatggtgtttcacagttctctctttcttgcatcagtctttcttrcgatatcatctgatattgggcctaaactatgctgctgtgagcattctttatttacgtatttgtgagtaaatgcctggggcagaatcttagcactggactccttgattcaaagggcatatgcatttaaaattttggtaacagttcccgagtcattttcttttttcttttttttctttttcttttttattttttttttgagactgagtttcactctgtcaccaggctggagtgcagtggcacaatctygactcactgcaactttcacctcctgcgttcaagcaattcttctgcctcagcctcccgagtagccgggactacaggcacgcgtcaccatgyccagctaatttttgtatttttaatacagacggagtttcaccatgttggcygggatagtctcgacctcctgatctcatgatctacacacctaggmctcccaaagtgctgggattacaggcatgagccaccgtgcccgacctcccgagtcatttcttatcttgttgctccaatttccattcccactgacagtgtagacagacaactgctgagggcttgcagtgttcttgggactagcaggagggcgtgtcaaaattgtaaaactctgcctatttgatgtaatatttgaaactagaaaggtaaaattccagggaygctagtgacactatggtaacctgattgtacagtgacattcatgtttaaaccagtcttggaagataatgctgtagcacaactgtttttgcatcattaaatttatcctcttcttttctgagaacacaatatatatgagaacacattcatctgcatttatcctattttaattattgtttgatgcttagagcagaaattcctggacctgccccaattagcgatgagaccttgggtaagcctctggatctatttggagcctgtttcctcatctttaaggaaaaaggttggatggatgatgtcaaagacccactgttcagtctttctttcttatattttgagccttaattgggtccctgtgagtcaatttcmgatgatagaatttgctgttttatagttttactctaacatgtagtaccttgagatagaccagtgatcccagactaagaattattcagaatcattcaccgtcggggacacagaaaaaggaaaatggaacagaaacaaaactaatacacgtggctccagatgtttaaaattagatttgataggttgtaggctgaagaaactcaacctgttcatcatctctcatcttttcacttgttctctctgtatgccattatattgtgttcctcattttcccaagatgatgattatggaaactcaaattttgcaccagaagctgtagttaccatttcattccattgcaccattcataccctgcagagaggatgtgaagtygtaaggccttcttgctctggtgacatctgttaggcttcgtctctatatcatcccccaactccttgacccttgatatttgctggtctacttcccttcaggtccttcctcacctcacatctctgcgcaaggatttcatctggtatgtcactaaatattaccttcctgtgtttctcaaggtcaatttgatagactccaatttttcaagctgctggccagcttgagcgtattcatatgttacctacgatgaatcacatcagtgtcggggccgggaaggtactgcaacatattggcrcctcacgggaggctctcaaaatgatccaaagttttttgttgcagcaaaagctcattcagaagtctttgggccatttggctcagcggaggctgtcatgtgccaaggctccgtgggcattcttagctctgcttctggagataagagttcattcctccatcccaacttgttcttccctgcccattcttcctcttcctgccttcactgcacattccgggatcgccatgttctagaacattcatgtctgccttttagccagcagaatgctattctcacatccacaatgggacagctaayagcccccatttatcaaatccctgtcatatgctgtgtcaggcactttatatccctcatccaggaggatgcaaaaacctggtgtttttcttttttttttttttgcattttccagacgagccaagrgatggctcagaarggtgaaggaactcacccgaattgcacagctggtgagctcagagtcagkctccttgcttggtccatctggcttccaaactscaagtctgtctgctccaccccatggcccatctttttaccatgtttagtatcaatgttcatactttgcagattttgctttcaaactctctagctgcggtttgagtgattaatttcaggatccatcctatttcttagaggaagccactctgatctaccctgtcgtctctttatattcaagatatcctttatagagctctcaaattacttttgggaagaaggagctatttaataaaatacaacttaagtgaaaacacattccatatagaagtatattaagaacctatatgtaattactatgactactaattatttcatgggaaaatgccctcctgctgagatgttttagatgctccaaagttagaagagaaaaaatgaaaacaattaaaacaggataacatggacagtacagaagtaaaccactgtcttaaaaggccaatccatttggcataattaaaaaaagagggaggagatggaggcacatcagcccccattcatatttaaataaagaaaacggggcagtggggcttgttcctatgttgtggaacagcacacagatgtgatctacctcattcacatccttatgtgaattatacactggtgccctcacctcttaagacaagcacctatcgttttcctgtgtattccaagaggccagtgtggctggtggaataagatgttttcctgttttcaagatgsagtggactctcttttatttarcagcagtgtctatgtgttaggaatccatgtgagttctctaagtctgggacaacgataggtgtgtctgagtcctgcattaccatggtttattctttcctttacccagtatctattggagttgggcttctgttgctttatttctcggggtctggcatatcccactccctgtcttgagatctcaggacctctgaggggcattgcatktaaagaacaagagcttattaggtatcaaaacatacttcatgaacagctacagcaagacctcgacattccagtgtagagctcttgaaagaccccagtggggctctgagttcctccttcttctgtttctattagatttctaaattttagtttctaaattttagatccccggaacttgggatctaaaactctggtcctgtggaagaaggaggtagggtagagtgggagcagatggacctgatgtcatccatctccctacgttgtttgcaggaggaaaagggatgaggctgaggctgggaggcaggggcggtggattgagagagaggagagggattgttatgagtaaccaatgttcctcatgcctgccaggccctcactagatctgtttaacagagagtgcagaagagcttctgttggggactggccattagtatagcgaggggcccaataagtgttgtgaaacatcagcatctgctggacattgagatggccacaggttggtcagagagggctggtatgggaagaggggcaggtggctctcccttagagttactatttgactcacccctgacttcccagaatgtgtcttgagtctattmccctctcatatgggaggggtgacccaagtatgtttgtggcaaccaaaatgtctccaggcattgccagatgtctcttgggggtgcaaatcgtccccagttcataaccacggctataaaacatgctgtattatagtggcaaagattagaatcagatacatcttatgaccttgggcaagtttcttaacttctttaaacctcagtttcttcatctgtaamatgcacatcataatatctctattcagagatacaggtggttctattaaacacatcaactctgtgtatataaagtcttaacccattgtggaataaattaagtgctcaattaaatgttagctgctgctattaataacaacaataataatattttcttcacgcatgaaagtgcaaagtgatgcttacttttcttaacctctccaactggctgaaagaggagctctagggcagatgtttatcagcctgatttcagtggagttgcaatgaattctttttctgtcttcatatgtctggactcctacattttaatggatgtgtatttagtttgttgattagtattttccagtgtagctcatattagcactcaactgtcatttgaaaagccatcttaactatttatgtgattgctttttcttttgtatttacaaagaaatacactctgcatatattttggaaagatgattaagggattagtcatcaggaacagcaagcaatggtttatatcaaaatgattattgagaaagcagagagatgaggggtaaaaataaaagatttattagccagaggtaatggaatgtgcatgttttagggagagagcgcatgctcagttgattgcaaccacacggtttgctgctgaagtgctgtaatgattcaggttttcaatagagttgatatcgggtctatttattttgtgggagtgaagggatagggatagtactgacagcattatgtgattgcagcctcattgataagcatcrgaaataatgactttaacattattttcagatagggagcactcagtaccaaccattatattaggctcatgggctcaacattttgctgtrcttttcatagatactgacacytgtgttttcattttgttgttgttgttgttttccctgccgggaaactgccgcatcctgtgttttcatggcatgatattaaggaacgatgggtaggatgctgaggagtaarttgctcgcacttttaaagacttctgcaaaactccacctacttttaggctccttaaaattcagtgactttatgagctggtatagcttcactgtttgtgggaattccatgcaatctcctttgacactaaaagcttaagtcccatgatttgcctttgtggatggaaggccttggccttcttttatgatatatgtgttggggggaggcatgtggtatgtggrgcgggtaaaatacgagcctcatgcctgtctaagctggtgacttggcttggaaaagatgatcattcgtcaacgcatcacaagtcacagggcttatctccattgttctgaacgatctgtagctaaacaaaaagataaaagctattaatattattaatagttgtagattaccgggaagarcgcatcctaaatcagccattagatttgttcctcatttctttgctttacaaattgtttttctgtatagtattggattttcaataaataaagkatgatataaacaagtctgcaaaccagcaagaactatataagccacttgctcaagtcaataagcgcaygctcacaaaggaacgtaaagttctgaagttcttctttggggcgtttgcaaaatgtcctattattgtcacctgcaggtggggggttggatattcctatttgtctttgtactaggtactgtgcttagcatttaacagtaaagtatttatattatgtgtgaaacccattgtgcagatgaggcagtttagaggctggaagaggcatagactttcccaggctcacacagctgggagataacggggtggatccaagatttgcagctggtgtgtgggtgatgccggaagattggcctttttcaaggacttagacaagtattgtactsatacattatttgcatttatttgtatgaatacttctgggttcctaatatgagggtacctaaaaagtacatccgctgcgcttcttgtaatctgagggagttgatgaacatgggccaaggaagctctttccttcgccttccgttccagacttccttttcgagtagtatatcgtgtatttactgttctacttcagttgcctatttgacctttcttgtcacaggctcagggaagattctttatcagataataaattattcatccccctcatagacataatcggttgctaaaatattctgagtttcctgtctccagaatacctaaaacttgtgcttggtacttatcctctaagttttccgtttcatttctcattctgaaaattttgcaccgacttagtcttgaatgttattcattgttctttgatcattgtctttgtgtcttctccttttttttttttttcctggccaccgctcgcagtcttgaaccgaatctttcaaactttatatccatgtracctttgtataatgagggctgtgattaactgcagagttttaaagagtgaaagtcaagcataggtggctggctctgaaccatcactcccaataatgtgaaacccaaagcagatgcatcctttcattaatgtggggtcccctgagttcttattaagcaattttgacatagtttgaagagacggatttcatgttcagacagtgttcagccgccaatggctgaaaggcctgcttttggccacttggcatttagactccattatttaagaggggaaaaatatgcctgagactgtttttcatatttattgtgggacatttagagaatctcagactagcaggtgttagattaaacagaggagaaacggtccttgtggtgataaaacttccctacgcaaggacaartagagaaacaactgtagatgaagcagccagtctcaggctggggcagcacgccctgcgataggttaaggtttattttagacaaatatttaaaatgcagctaatttttacatatgcagacgcaacccagtggaatagaggtagccccagctttggagtcatacagatctggggttaaatcccagtgtgaatactaactcactcggtgtccctgggcaaatctggtcatctctctctctcttttctttttttgagatagggtattgctctgtcacccaggctggtgttcagtggcacaatgatggttcactgcaaccttgacctcctgggctcaagtgatcctcccatctctgcctcctgagtagctgggactacaggcttatgccaccacacctggctaattttttttttttttttttttaatgtagaggaagggcttcaccacgttgcccaggctagtctcgaattcctctgctcaggcgatcctcctgcctgggtctcccaaagtgctgggattacaggcatgggccatcgtgcctggccttagtcatctctttgaaccttggctgatttacctgcagatgctaatatgactctcagattctggcacatagtaaagattcagtaaatggtcgttgcagggaaagctaacttgtccaatgcagatctgtaaaatatactcataaatcttgttggagcaatatttcttctttgtcttacttcgggctaataacaaaaatatcatacaatgagtggcttaaatatttattcttacagttctagaggctggaagtccgagacgagggtgccaaccttgttgagttcttagtgaggtccctcyttctggtttttaagtagcctgtttcttgctgtgtcctcatatggtggagagctgagaggaattgagagagagagagagagaggtcgcactgtctcatgtgtcttgtaagggcactaatcccttcatgaggattccactctcatctaatcacctctgaaaggccctgtctccaactaccatcacatgggcaattagggtttcaccataataattttggagggacactgtattagtccattttcatgcttctaataaagacacacccacgactgggaagaaaaagaggtttaactggacttacagttccacatggctggggaggcttcagaatcatggtaggaggcgaaaggcacttcttatatggtgtmagcaagagaaaaatgaggaagaagcaaaagcagaaactgcctgataaacccatcagatctcttgagacttattcactatcatgagaatagsatgggaaagaccggcccccatgattcaattacctccccccgggtccctcccacaacatgtgggaatcctgggagatataattcaagttgagatttcggtggggcgcagccaaaccatatcagacacaaacattcaattcacagcattctaccccagccctccaaaattcatgttyttctgacatgctaaatacatttattacatccaaatatccccaaaatcttaactcattccggcatcagctgtaaagtctatgtctttttaatttttttaaatgatcaaagcactgggaagtagccacttctttcctcagcttcccaccaatgtgtcaattaataatctgactaaggtggccgggtgtggtggctcacacctgtaatcccagcactttgggaggccaaggcgggcggattgcctgagctcagaagctggcgaccagcctgggcaatacggtgaaaccccgtctctactgaaaatacaaaaattagctgggtgtggcggcatgcgcctttagtcccagctactggggaggctgaggcaggagaattgctttaacctgggaggtggaggttgcagtgagccgagatcaggccactgcactccaatctgggtgacagagcaagactctgtctcaaaaataatagtaataataataataataatartaataatartaataataakaagaatctgactaaggttattaaccattaaggtatgctgtgctaaggagcagggggccccttccatccgtagagggcagaaaggtgcctatcatgtcttcagtgtcagtgccctggtatggagctagctggccttccacaggttctggagttaatgctggagagaagtaggggtgkcagagcctaccctgtgttcctaggggggttcatctggagctagtccctgacccttaggtggaagatgcagctatgcccaaggttctgaagaccctgtaaaaggaagccttagaagtggctgcgattgttttaaagtctgtccacaaattctttgataattctcctttcaagaagtagaggccagttctcctctcttggaatatgggctgtacttagtgactcactctccatgaatagaatttggcagaaatggccgggtatgactcctgaggtaggtcctaaaggcttcgtggcttcttcttgctcactctcttggatcactcaccagccaccatgttgtgaggaaactcaagcagacctgaggtgaggcccatgcaacaaggaattgaggccaccagccatgtatatgatcccccttggaatcctccagcccagtcaagccttcagatgactgaggccctggctgattcatgtcatgagagatcctgagtcagaaccacccagcagctaagccacttctgaatccttgacccacaaaatatggtaagataccaaatggtkactgttttaagccactatgctctgggggaatttgtgatgtagcggtagataactatcacaggatccatggcctcaaggggagaaggatccttaagagagactggacagtgagttctaaggataagacatgtatacttacccaggaagctccactgtgtgcaaggaatcctaagttcccggggttgcatccatctcccaggtcaccttgtttgacctctctccaacacttttaaaacatacctgatcaggaatcaccccgctttggcataagttcctctctccccatgctgcccatcccatttctgcacacctcttaattagtaagttctccctcatattgaaggcagaatcttcctctgagcgtcttctatgcaccggccctggtcctgccctccgagttccactggctgcattctcatcagaacccagctaaaactcacgtctctcaaattccctaaataataaatccaaagttattgaagatattgggwtactaaaagttggcagtgagactggccccactcatttctttgtaacccctgtccctctttttattattgaagcttgggatgcacttggtaaggctaggcagctggagagcgtgcagactcaggagccaagacctgccttgccttccctggagttaatgaatcagtgtgaatgaagagcacagtcttcttttaaatgrcaggggaaccrtgcacttatttaccggcaattctcagattctaattgttccgactacaatgcgtcctgtaaaccgggtagctgggagaaacttcaatgcatctttgtaatggctttgttgttgtttattgagagggactaattaactttgattattgcactaatattatggcactttgacagcccttcagatttatgactctgggaaaataaacaaatgaaatgcaggtgctggagcagaaagaataagttattactgaactttaattacttggaatgcgtagccaggagagaattagttgatgaattacaggatgcttaaaatctacatcaaattgcaagcaataagaagataaaaataaaaaggaaggggcaggaagggtgctatttttaaggcagggaaggataggatgcatttgcagtggtctccgtggtgtttcattgattaaactttgtggtctctaatgctgcagatatgtacatggtgctactcaaagcatggtccctgacctgcagcatcagtgtcacttgagagcttgttggaaatgcaaattcttgggccccaccccagacctactaggtaagaatctctggaggtagggcccagccatctgtggtttgcagttactccaggagattttgatatctgcagaagttgagaagcatggctcaacagttctcatgcagcttgctttttcttttataaaagggcgggtacacatttttatctttgcttatgaaaatcaaatgttttcccaacccagtttaccaagtagctcccaaattttcaagctattttaaaaattggctgaaatttaaaaattttgggcaattttaatttatccaacatctattacgtgctaggtggtagagtgggtgacacaagatagtctagaaggattttgctaatgaggtgatacccctaaactgtcatcgatgccagcgcctgggtagtgtggtaagagtgatactcccatgactcatgaaagatggtctccccacgtgctttaaagcaggatggttgcaggagaaagtattggtggactgtgaacagcccccatggcaagggtgcatctggagctggaggaagagcatccacagagtgtaagtagtttgtcctgggaatggagatgtcaggcttgggtgtggtgtcggggagagggcaggcagctcctctatgaggccagatcattcggggccttggattccagtcttaggagaatagactttattctctaggtcctggcagccatcactggctgagtctgagtggtggtgatacagtccatactcagtgactgagatagacagacatttgggctgaattagcgaggggagtgcggggtctggagactctgttggcctgttggccatggtcctgggcgcaaagagcagaaaaggacgagacggggactgaacagacttgcttagttcctgacattcaaggaagaactttaacgtccatccacggagcctcaaaggctaaaaataatcatccctttcaatagttcctgttgtgaggaccattaacaaattataagagaaagcattcctcacttgtagaaactccatgaaaacagacatgtgtttacttatctgcaaccctgtgttaggaggagggtgatgagacactttactgtttgaatcaggaagtgctgacagtgaagggaggagctcttcataattatacccggagagcaggcaagacagccacatgcaagtggcctggcctggctgggtttggtacagaggggattagggcagattcaaacctcactggtcccccgtcccagcacttctgtgctgtctgcagttactaagcacttttcctgtttaagttgttgctgttttcattcccgcaaaagctcagccagcctctagcccaaaattgtctctgtttattggacagttggaaatgtcactgtggccccacagaccttgttgtcaagcaggctgctacgcttttattctagagcgtctttcatctgatttcctccaccatctggaaccttctggattcttcctcttatgggtagtgatgggcactttaggagtaggaatacatgtcagtgctagaccacatcctttcatacccggaattcgcatagtgacatttaaaaatagatagcaggccaggtgcggtggctcacgcctgtaatcccagcactttgggaggccgaggcgggtggatcacttgaggttaggagttcgagaccagcctggcaaacatggtgaaactgtgtctactaaaaatacaaaaattagccagttgtcttggcgcatggctataatcccagctgctcaggaagctgaggcaggagaatcccttgaacctgggaggcagaggttgcagtgagccaaggtggtgccactgcattccagcctgggcgacagagcgagattccgtctcaaaaaaaaaaaaaaaagtaatcattttagaattgctttctcttcgggatggtttacctcgtgtttagtctgtaaacgcggataaccgagagctggtcaaatgtttacatggggctgtggaccattttgtatcattggaggagaagccagggcacttggcaggggtgttcatgatgataatcaggtggctgggtggastcrccatttgtggcatcctcaaagacttgccaacatagacatttttggggagacagaaacacagaaataattctgcagtgctttaaagaatctgttaaaaatcaagtttctttcagtcatgtatgatccattgggctttatataacttttagcctttgcyttgcagggacagcaaagatgtgagcaaatttgtgcaaacctaatagggtgaaaaattgaggtatgaattagtaaagtcatttgtccttctggaaagagttatggattaacagattacatttgggtatattgtggttgtgaaaaggtaacattctcagattggaaaggactttctgagatcatccaacttaactttccccacttgacagacaagaaaactgaggcccacagaaggtaacttaggcaattaattaattatagttaataattaattctgcctgcagaacaggaatatggcccccaacgcttcatgcttaattggatggcttattaaattcttatttttatggtagtgatgatgatgataataataataataacagtagtagctagcattgttttccagtgctaagcactttaaatgcattaattcagttcatctttatgacaacactatgagatagctaatattatgaatcctattttcagatgaaagactgagtcttagggaasaaacagccgagagatgaaatgccacagggatgtctaggttcaaacagcaacagaggtgcgtaccatagggatgtggaagccttgcttgtcttgttcctcttggtataaccccagtgagtagcatagygcctggtcaattggagggatttggtaaatatttactgagtgagtgagagggtaaaacagctgagccatgggagttataacttgggcagcagtaatcctgccattgtaggaggggacagatcggctggttagtttttggaaagcagaccagcagaagttgcaaataacttgttgtgttttcctaagtactgagctgtgtgaattggtttcatgttgatgttactgaagtctccccaattcatcatctaccttgtagcttgttgaagaaagagtccttatttacagtctattatgttaaacgtattttattccagttctttgaaaatgacccatcctgatttggaaaatctctaacttgcctggtcattctggagcagtgggagccgactgtgatgcagagtggactcataatccagcttgattttgagggacagaaacctgggcctttaggtagaatgaacagsttaaaaggctgcacctgagagtagggggcatatgggtaaatccagctgtacccaagagttgggggcatatgttagycctactgggtaaatccagctgcacccaagagtagggggtatatgttagggctagtgcgtaaacccagctgcacccgagatatggggtatacatgagtgctattgggcaaatccagctgcacaggagagtaaggggcatatgttagggctagtgggtaaacccagctgcacctgagagtaggggtrtatsttagggcttgtgggtaaatccagttgcacctggcagttggggcatatgttagggctagtgggtaaacccagccrcaccsgagagttgtgggtatatgttagggccagtgggtaaatccagctccatctgagatatggggtatacatgaatactagtgggtaaatccagctgtacacgagagtagggggcatatgttagggctagcaggtaaacccagctgcaccccagagcaggkgtatacatgagtgctagtgggtaaatccagcagacgtccggactgtgcttgagggtgtcatcgagagagagaaggttgatccgaagttagtaaaggctttaaaaattaaaaggcctgagatgatggtagggttttggaggtaagtataaaaaccttcttgttttctactacttaaagctgaaaacccagcttgggttggctttgcttctaatatccttcttcctttttgtttcrtaagtaattgtcctgaagcctgtcgagataaatgtatactgaaagagaaagacacagaggagagacaggcatacagagaaagagagacacgcagacacacgaaggggaggtggagacacggaggagggacagaaagacagagagagacagaaggagagagagagagagaacctgtctagcggtgtttttatgaggtttttagtgctgggctttgcatcgtggtgacggtgtgtgtgtgggggtgttgatcactgttttcagtgttctctgatcatttcttgcttagaaaggaggaaattagaattgttgagctatgatttgttttaatcagaaagaaattgtctaacataaatctcttcgtgagctctggaaaagcccctaaagcggccaggaaaaaaatatcaatactttgcaaaggaggaatgattgttccaattcgtggcttaattgactttaagccttaatgaaactaaggccggagcgggtggcacactccgtggctgggatccacagtgaaatctacgctgggagaggaggaatttagggtgrtaatttggttctttgctattgacgaaattttctaattgactggggttacttaataccagataatatttttttcttgctataaagagagtaaatttgtttttttctgaggaacacaggaatttattttaaattacagctttttctattggaagcattcatttatgttggattattgttccctgagtgaaatttcactgatgctgtataattaaatayagatttttttagagatagtatatattttagatgtataagtggataaactggaggtatggaaggtctttatttaaggagaataaatagcccaccccatcaacatgatggcccttggaaaggactcttttagcctccgcgagttccttttccgcaccaggctccacttacgaaggactgcaaaaacttgctaaygtcatcagtctgaaaggattgagctgtaaaatgtgttatgggggcctaagcaacgcatctggaatttagccttcccaagttcaaatccggtttatgccacttgcgaaaaccatgtgaccttcacttgttcttattgcctcagtttcctcatctgtaacttggggatgatgacagtatttggatcacaagattgttgtgaagatgaactgaagtgctaatgtgaaatgttcatgatggtacccgagtacttgcggtggtacctagcgtgtgctttccaagtgctggcaaagaaaagaaaagaawtgcttggggctctgcctacctgtctaggctcctgtctggccattctctttcttgttccaaccatatcaaactcactgctgttgctaaaccttcctgtctctctgcatcttggcacagactatgtcctctgcttggaagggtctcagctaagcttttcctccccacatctgcctctgtatcctgtgagtctctgttcaagggtatctttcccacaaagctttcctgggcttctctttcctgtctcctgccctcccttccttcttttgttcagcacatcgctgtcaaccttcttctctgggtcaggtagagcactgagcaccagtgatatggcagtgataaagaaagcaaaggttctcactgggtgtggtggctcacgcctgtaatcccagcactttgggaggccgaggtgggtggatcacgaggtcaggagatcgagaccatcctggctaacaaagtgaaagcccgtctctactaaaaatacaaaaattagcagggcatggtggcgggtacctgtagtgccagctgcttgggaggctgaggcaggagaatggcatgaacctgggaggcagagcttgcagtgagccgagattgcgccactgcacttcagcctgggtgacagagcgagaatctgtctcaaaaaaaaaaaaaaaaaraaagaaagaaagcaaaggttttttcctcccaagaactcatggtccaagttttggtttttaaatatgcatctatgacagcacggatcacatagtgcattgattgtttgcctgtaggtctccttatttagtcaacaagcatgttttgatcctttattctataccagccgtcccactggactctcagcacatataggtatgcgagacgttgtccttgccctaagtgtggagacagacacgtaaattaatagtaataataatatctaccacccactaggggtctatgtgtgtatgtgttgggggcggtgtggctggggagggaagcaaggcctgtattatggcccragctcaagaatattcgggcaagagcagatacaatgcctgtatttctcatcacttttgggtggcataggaccagttggttatgagcgtgaaaggttttctttgactttggtggtctagttagtggttgagaacatggattttggaatcagcccggtggaggttggaatcctggctgcgccgttctgtagcagtgttgtggatctcagacaaggtgttcctgcatatgcctctctatcttcctacaagaaatggaggtattgcatccccgaaccgtaggatgcttgtcaggattaaatgagataacagtgcctggttagtggcacatgctcagtaacacctgccaagtaccactcactgagccgaaatctcctgaataccaccccttcatgccttgcacatcctgggttctaactcattgaggtgcccccacctttccttcttcccatcaacaactcttgtgcccacgagggactggcctcctcagtgccacacagagcctcccctgagtagatttgtgtcattttcaaacaaagcatcctcgctgcagtgttggattttgtaggatggtgaccgtttacagaaacctctggtccgtgagccaatttggagaaaattgaatcattctctgtgcctttcggcttgcatcctaaaagcctgcacaaacactttgggcaggcttcagcaacttcacatcaagggctcaattgcagctccaatataaaaacctcccccgttgctctctgtgtgtgaagctggattccatgcttggcacagacctcggtgctcacggtaatgcttccttccaccatatcagaaggtcctcagcagccgcagccacttaacatgctcggtgcttctctgtaggaggattttkaaaaagcaggaactgtcagggtcccaaatgttcagtggcacttcagccagaggtaggatagggattttgaagtgtttggagaagtgttttcatatttgaatttacggggatggggtgggctggggtaggcaagggacagactgtagcgattcgcttggtgttttctcatgatgccagagaaaatgacctcattatcatcatgctcacattcacctttgccaggacccctgtgtagaaataatcatgaacttagtgactgacaatcataagcgttttatgatttgtggaggatttatatgtgaaggaaaatggatgaattaaaaatattaaacagcttagccggcacccacatggatgaatcaccgagatctattttttccccgtttatactataaacatatggcatgaattttctgctctcattacagatgctgagagaaggcaaagacaaatatttatattacattcatgttttacagtaaaaacactgttcggtttgtttacacagttccactgttacagtttttatggtcggtaatgcaaccaccgtaaaagcaagtctgggttatatagcagatgtgataagccctcatactcagagagatgtctgggaaagaatcgttgatgtcacatgtacaggatcaacaatggaattatgtgttgggacagtctaagttatgctgtaataacaaccaacctcaaaatctctggggcttgaaacaacaaaggtttatttcttgctcaaactgtattttcatcatgagttgcttggagggatctgtgagatggggatctcactcagccaccggggcccacagagcagcctgcactgctggatgttgtgacagaggaagagagggatgtgctgaccctcgctctggctcaaaagtgactcctgccatctctgctcacattccattggccaaagcaagtctcagggccaaggagtgggcagtagtagggtgctgtgtgtgtgtacaaacccaccatatgtgcatagagggaggccgagaactggactatcagagaatagccaaagatttctttccacggtcatgtcaagcctttttgctgttatttaattgatgttctatttttaatgcaacatggaatcagaagaatatagaacaggcgtcaaagaccctcccgcctctgtaaccgcactgtttaaaattgatgagactctgtcttcattcgaagatgatctgataggaaggattcacagctttccccaagaatacaccacagtgcatacaaatcctcgaagccgcagaactttttcaagttgaactgtgaactgtgatttttttttttttttaagtaagtttacatgtagaagctcattggtagagagctttagatatattacttcccagggtggtgcatcctgtcaccatgaagtaggcatgaaatgctggagatatgcgttcattcaaagaaaataaaaaggcgcaattatgaaaagctctcaaagtgactttttattttattttttatttttacatggagtctcgctctgttacccaggctagagtacagtggcgtgatctcagctcactgcartctccatctcccaggttcaagtgattctcccgtctcagcctccagagtagctgggattacaggcacccaccatcacgcccagctaatttttgtatttttagtagagatgggtttcaccatgttggccaggctggtcttgaactcttgacctcaagtgatccacccgcctcggcctccgaaagcgttgggattacaggtgtgagtcagagcacccggcctcaaagtgactttaacagcaacttaaaggcggtggctagctctgccccattcagtatggtagccactggccatgtgtggcagttgagtgcttgaaaggtagttagtccagattgaaatgagctgttgatataaaataacatgactcccaggtttcagacagtataaaaaaatcttaattaacatttttatattagttccatgctgaaataatatttgagacatactaggttaaataaaatatcattgaagttcatttaatctgtttctttttacctttttttttttttgacacggctcctggaaaggttaacaatatgtaggtgaccctttattttcatcagacattgccgacctagagggtaaccactggagaggaaaaaagtacaatttggtatttttgtcacaaatccttaattgctagaactcacagtttaacctgacagttgatcaattgatatcctttgacttgttggaattttattctttacattcgtcttttaaaaagctttattttatgccagatgcagtgmctcatgcctgtaatgtcagcactttgggaggctgaggcaggtggatcacttgtggtcaggagtttgagaccagcctggccaatatggcgaaaccctgtctctactcaaaatacaaaaagttagccgggygtggtggcacgtgcctgtaatcccagctactgaggaggctgaggcaggagaattgcttgaacttgggaggcagaggttgcagtgagccaagatcgtgccactgcactccagcctgggtgacaaagtgagaccctgtctcaaaagaaaaataaataaaaagctttgttttaaaataagtttagattctcatagaagttgcgaagaatagtctatagtattcttcacaagggttctgggtacccttaacccagcttccccagtgatagtcacagcataacaatcaagtctgggaaattgacactggcatgataatattaactaactacagattttatccgagttctgctagtgtttgcatgtactcatttgtgtgcggctctctctgtgtgtgtgtagttctatgaaaagttataacatatatacatttggtttaccaacatcatagtcaggatacagaactgtcccatctccccaaagaaacaccctttaccttagtttttattctttgagttatatcttaaccaggttaactgagggtaattgtcttaggcaagttagtaccaaatgatgctcttggttccttgtctgtctttttgcccatccaacccacccttcacacatggccgagttatgccaaactttgcaagaggtgccaggtgggcacaaagaaaagaggactgcactcaaggaacttagtctttgaggccaagcacggtggctcatgtctgtaatcctagcactttgggaggctgacacaggcagatcacttgaggtcgggagttctagaccaacatggtgaaaaccagtctctactaaaaatacaaaaaattagctggccgtggtggtgygcacccgtagtcccacctacttgggaggctaaggcaggagaattgcttgaaccgcggaggcagagattgcaatgagccgagatcgcgccactgcactccagcctggtccacacacagagtgagactctgagacttcgagactctgtccccaaaaaaagacgcaaaggagctcagtctttgaagggttacagaaacagtttcactagaaggtgtgacattgtgtaacagaaatcggttccttaacctgccaaagggaagaaaatagtgcrgaatcttttctccaggtttcaggacccatgtctgttgtccttcctttaccttaacttcagcagggcaagaatggttcaagccacattagaaagcagttactttctcacccaattttaaaggagaaaggtaratgcggtgggttctagggatttcagtgacgtaacaggtgtttcccaggcattaagacctagtaaggtttccatttccrttaggtattatggatgcattccaagaatttaattactataacatcacttcattcattgtaattccttactagagttatgagaacttgggattgtgtggtttcttattcaatcgattaaaagstacttgctatagttttctaactagctatttatatgaaatttagtacttgtcaatatgtattaaatcaatacagttatatttatcaaagtggtgagaagagtttacatctgaacatagaatagattgcttgccttggccgggcgygggagctcacacctgtaatcccagcactttgggaggccgaggcgggcagatcacgaggtcaggagatcgagaccatcctggctaacacggtgaaaccccgtctttactaaaaatacaaaaaattagccaatgtggtggtgggtgcctgtagtcccagctactcgggaggctgaggcaggacaatggcgtgaacccaggaggcggagattgcagtgagccgggattgtgccactgcactccagcctgggtgacagagcgagactctgtctcaaaaaaaaaaaaaaaaatagtagattgtttgcctcagttgggaaaaaataaagttttaaggctctagaattggagtgactcagctttacttgaaaaatcccagaatagtaggaccatcatttagaagtttcgagacgataatattagggaaaaataacagcaaatgttacttgatagacactaaactctggggcatatgagatgacccaggctggaaaaccactggcttacataaaggtattgacagacccatgggtgttaagatccttcatggctactggggagaaatgacaggccttttgaaatcgtatcagtggttttccctgggatcactggaaakaatacccctgtttgacaagatatgacacatgctctgttttaattctgcatttgactaacagaaaagattggtgaagatcagactctgctttaaagttattgaagcagggtacaaggaaaaggggaagggaatagaggctgcagaggagaatgggggaagggggcaggaaggtaaaatttggaggtgcaggcagagtcaaggtcatgcctgaggcccaaccttcctgttgaagctggtgtttgattcaagctgtggctgagaacgtgcagctcatctggagggtagagttgcaagacatgggttcaggtctgagccaagccagaaactggagaaagcgtggcttctcaagactaggaatacctagattccagaggtggcgtgggcatggggcacattgtgacaagttaacagcaagatcttcagagctgcagctcacctgtgccacgatggtctcctaggagccctttcctgctgtagtcccgccccgaggggtttcacttcccaytgcctcttggtagccgtgggcactttggtgctctgatgatgtaacatggagattgtccttgtctccatcgctgtctttactggtgtatgcccatgaggtatgtcaaagtctgtatgtctttgtaataatgctggatcatttgtccaccttcagagacarctgaagacagttttaagtgaaaccacacagagggcatataccattgggacaagaggtctgaagtctatttttgagaaagagaagagatcaagtagttaacagccagtggctatcataataatggcacctaaacaaatccttcttttttattttatttaattaattaacttatttatttttgagttggagtcttgctgtgtctcccaggctggagtgcaatggcgtgatcttggctcactgcaacctccgcctcccaagttcaagcgattctcctggctcaacctcctaagtagctgggattacrggcacctgccaccacgctcagctaatttttgtatgtttagtagagacgaggtttcaccatgtttgtcaggttagaccggaactcctgacctcaagtgatccacccacctcggcctcccaaagtgctgggattacaggaatgagccaccacgcccggctcaaatccttcttacttttcctcaagaactcacttcccacccaaacctttcctattgtggcagctgttatcttgtccagcacatgtgtccrcacttggtattaatagctccatcttaggaactatgaaagtgaggggggtggtggtaatttgcatgaactggtttgggccagttatggtctgttacatccttgctgaaatggttggtgctaagatgagcacttggcttaggccagaccagtccctagcctgtggagaaggggcaatctcttatctgaaggcctaggagstgcagggatgtttatatgggctgctagcgcttagtttcctgccacarggagacagtaagaaaggtgacgtcaatctgagatgagagrgagagcaaaacagttcttttgaccaccttgaccccgaccttgaaataaggtggaactaataamtcccsctttgtgctggagcaagttttggctgagtttctgtcacttgcaaccaaatcagtcctatccagtatacctagtgactctctggtctccaaaggctrtgcctgctgggtactgagtgtctccccgaccgaccccatgatggctacagtgcacatcccttccagccaactctattgtgcacacatattcgtagggtgagttgggccccaggtagagtgattggctcagatcctgcatcctttcagggtctgactgtaatcacactggcatggcagggggaaagtgtattggatttcagagtcaaaaaccacttggtatgaaacccagctcattttctatgtggatgtccaacctgagccagataattaatcttggagatgacgctgcatacttcatcaagttgtaaagttgactgctgtgataatggagaatgctggacaggctgcttttcatgtcatgggttcgctatactttagttcccattatatcatcctgccaatccccatttgttgtttttttgggacccagggtatcagtcatctgatcattgtgtgactttctcaaggacctttacttgagtcttgcacctctggtccacaatgtccacataccagcttgatggtgacttgtgtcattctccatccccttgttaagagaaaatctactttatgagccctctttccaaccgcagtgwtgaggactagaccaggcaagatgatgccgctggaccactggatccagctggaccgctagaccacagagcccctggagcctcccaaggccaagcccgccagccacacacacctttgtgagaattaagaaaagatgccccctcctcttggggcccacagctcctccacctgggcacccagcctggtgaacagggtgcaggctgggatttagccctaccttgcttttggaccattgagctactaagttggagcaacaaggcttgrgaatttttctttgatcataggtaggaaaggtaaaaaaacataaatctgccaatagaaaatagcatcgtaatgagtttctactatatttgtttgggctttgaaaaatatgccgccaaaatatatcaatgtatggtcccaacgttttaggaagttgcatttaaaaaatcttggatacctgttttgtacatattatatatagcatcccgtgtgaatatgttaattcctttttatgagtttcggtcttttttccctctcctatacatgattgctgttttatagctccagtttggtggaattaacatagatttcccacatggggaaggttttgggtgaggatttagaacaaggcaggttcttgatcctcggaagagattcttatctgagrggggatttgagaatggcattgcagagtgggaggcgctgctgtgtggaaaaatgaactggaataattattagaacagttctcagaatttacaggatatttgatcataggagtaactttcctcaggagtgatggatggaatgcctgtacttggaatatttttaaattaatctattttcattacattgaaagtrtgacacacagagaacactaaaattggatgaggcactacctggaattatataaagaatgacaaagatgcggttatccatttattttctaggcaagttagttagcctctctgtgtttctatttctttgtttataaaagagggacaaaaataggacctattactatctaggtgacaggatcattcataccccaaacctcagcataatgcaatatactcatgtaacaaatctgcataagtacccccttaatctgaaataaaagttgaaattattaaaaaagaaaacgaaggccgggtacggtggctcatgcctgtaatcccagcactttgggatgctgacgcgggtggatcacatgaggtcaggaattcgagaccagtctggccaacatggcaaaactccgtctctactaaaaattcaaaaattaggcttggtggcacgtgcctgtartcccaagctactcaggaggctgaggcaggagaatcacttgaacccagtaggcggaggttgcagtgagccgagatcgcaccactgcactccagcctaggtgacagagtgagactccgtctcaaaaaaaaaaaaaaaaaaaaagaaagaaaacaaaaacaaataggacccatatccctggattgttgaggaaatacgtgaacatatgtggcacacattatagtgtctggcatacaataaatactttgtaatgttactggtgtyttcttaccgttattgtctcactggtgaccgtttgaaatgttgaagctttattrttacagataatggtggatatagtstcttccttgtttattttttgacagaatctttttttaaaaaagtttttatttgtttggtgagaatttacttgttacaggtctagtgctgttatagttgaatgttttgaattatgtaacttaagtgaaacataaagctatgacttgaattttgtggttagaaattttctcagtygattgacaaggatggcgtattggccaccttttgccgcagtaacaaacaatcccagactctcaaggcttgcaaaaataaatgtgtgtttgtttgctcataacacatgtggctgagggttggccrtggctccacagtcacrggtgggctttcctgggctcagcttctcacagcgtctccttgcagggcccaggctgtaggagatgtcatcagggcctgcagagggcaaaacctcacagaggcttctgttcatacattgttgtacctcatgtgtgcgtcatattgtcatatatcaatggcagtagccaagaccaacagccaagaccaatgtattctgcccacaggaaagtgaggcaaaggcagggagggaatgataattgtgaacaaagaattcacttgaccaaagatggttttcttgatatggttgccacttacctttcagtaaaatagcacttcacaaatttgtttaatgttttatctcaagctcccagaagtagctaaaaccacgaacatacatgttgaaaatttcaaaagggaaaaaagaaaagaaaggcacatctgagtcaggaaaacattaactagtcttatttctgagaatcaaaccggtggtcttttcagtgatcagtcaccccattaaccacacatgaatggcacaagtaggaaatgcctgctcagagtccctggaagaggtatccagatttatggctcatcccagacttctctaatcgaggctgttttccctctagatgccttagtcaatcagtaattaatttgaaatccaaagtttcattaagtgttattgagttctcgcacactgaccatttgtagtgctatatttcttttaaaatcaccaaaccatttttcatactgtcgtttgcatattttaacagaaaagattgtggttctggtgtgaatgacccagttttctggatatatttacttgaaatgtcataaacttattatccttctcttccacttcattgcttttctgcttttctgaagtattttgaaatcatatttaaaacatcattatagcctctgaattctatctaaagcataactaaactttaccgggtgactgttttcaaaacaataccaagaagctggtcttatttagatctagtcttatatcattgaaatatcattagaattcttatggaaaatatgttttggctgtttagrggatgctaggggctggaagtgagaaggtttcaacaccatatgggtatgtgagtatagatgcttacaagaagaagggtagacttagccaaaactaatttgggatttttgtttgtttgaattgttggagggtggatgagagtgaagacatatcctttgaaacttaattaattttatttattattannnnnnnnnnnnnnnnnnnnaagtagctaaaaccacgaacatacatgttgaaaatttcaaaagggaaaaaagaaaagaaaggcacatctgagtcaggaaaacattaactagtcttatttctgagaatcaaaccggtggtcttttcagtgatcagtcaccccattaaccacacatgaatggcacaagtaggaaatgcctgccttctcttccacttcattgcttttctgcttttctgaagtattttgaaatcatatttaaaacatcattatagcctctgaattctatctaaagcataactaaactttaccgggtgactattttcaaaacaataccaagaagctggtcttatttagatctagtcttatatcattgaaatatcattagaattcttatggaaaatatgttttggctgtttagaggatgctaggggctggaagtgagaaggtttcaacaccatatgggtatgtgagtatagatgcttacaagaagaagggtagacttagccaaaactaatttgggatttttgtttgtttgaattgttggagggtggatgagagtgaagacatatccttttgaaacttaatttaatttttatttwttattattattattattttcaattttttatttttattattattattattttctattttttatttttattttttgagacggactctcgcactgtcgcccaggctggagtgcagtggcgtgatctcggctcactgcaagctccgcctcccgggttcctgccattctcttgcctcagcctcccaagtagctgggactacaggcgcccaccaccgagcccggctaatttttttgtatttttggtagagacggggtttcactgaagtagccgggatggtctcgatctcctgacctcgtgatccgtccgcctcggcctcccaaagtgctgggattacaggcgtgagcaacttaatttaattttttaaaacaatatatgtctctttggagtcagggtgtttgttacagtgatgttttgcagacaggtttattggaactgcttggtaggtgataggtttttctttctgttttttaattaaaaaataagattggccgggcgtggtgtctcacacctgtaatctctgcaatttgggaggccgaggcgggtggatcacctgaggtcaggagttcaagaccagcctggccaacatggtggaaccatgtttctactaaaaatacaaaaattagcctggcgtggtggtgggcacctgtattcccagctactcgggatgctgaggtgggagaattgcttgagcctgggaggcagaggttgcagtgagctgagatcatgctactgcactccaggctgggcgacagagtgagactccatctcaaaaaaaaaaaaaaaaaagatttatgtcaagaattcacatttctggcctctcttaaaaatattggaagacatggcaataattatctgggactgaatagcagctgcttctttttgggacaggtgatcacccccaaccccaaacccctacccttaactcttctactcctttggatgttatccctgcctggtttaaccatcaaccctctaactcccgatccttttaaacttcctctactctttttattcttagcacttagaacccactaacgctctatgtaactgtcttacgtgttccatttcttgtttctagactgtctccctccagtagaatgtgcgttctgctatacagcagtgctgtgtgacgcgatagcaggtcctttttaaacatctgttgaaggagaaaatgaaggcacacgtggccttgctgacatctgagtttgcaacttcttttatgccttctgctaactgggaccccagtgggcttccctgctacaccctctgaggttccccagwcctgccaagctgttccatccccagttccttggtgcctgctggtacttcmccctggagagcccagcccttccacttgttcagatctcagtctctcatctgggagggacagcttgagcactatgacctgtgtgaagcttttcccagtgctggcagactgactggaacctgctccttcattaaacctgacagatgcctccacctggcagttctaccctaagaccatgaacttcttgagggagggagatgtgacttttcatccctgggacccagcagctggctcacctcctactggttagtgggtgatgattggatggcttccgaatgaactcaggtgtcttaagtaccgttggtcctgacaccatggccaccttccagaaatttccacatgttaagattgcagatgcaggctggacacattagtgatttctaagtgctaagaaaaaaaaagagcggctcacacctgtaatctcagcactttgggaggctaaggtgggcgaatcaccccaggtcaggagtttgagaccagcctgagcaacatgacgaaaccctgtctctactaaaaatacaaaaattagccagacatggtgctgggcatctgtaatcccagctagttgggaggctgaggcaggagaattgcttgaactctggagacagaggttggcgtgagctgagatcgcaccactgcactccggcctgggtgacagagcaagactctgcctcaaaaaaaaaaaaaaaaaaaagaaaaaaaaaagattgaamatgtggaatatgagacaaatgaaaaagattgaattccgttccaactgggcttttgaatttattttcgcacttcctattttttgagcccgggagtgcaagatgtaagctaagaaaagataagatgaaagtattgctctaacattctggcttccttctattagagaagaatgcaaatctttgccttatctcgatgatgggccccacttaaccctttgttttactgagagcacttttctgcagatgatcaagtggaatttactatgatggcctgtcaaatcttgaaataatctacctttaaggaagaaaagtttaactagatgattgtaccttttagccatatctacaattaatttgaatgtattgcaagctgtttaaaatattccattagtgaagaaggtaagcctagcttctggtaaatacactactaagtgtttatagtacatttcatattttacatgatttcctttataattctgcttatcttttcattctaattccctgaaggacatataaaagaacccctaaagagagtaattactgctgtactctttaaccaaggctccttttgcaaagagaaatctgagctgctttttaaagaaggccgtttttaaataaaaatgcaaataagctactttgtaacyacattaattacccacctagcctcttattaccatgtttgtattgtttgcaaatactatttacagtcgtgtggaaattaacattactggtcctgaggaaagattgtgttggggaggttgtgctttggaaccaattagggcgaaccttgtctccactgagactctggggaaaagcacagccttgcaatgtcaaataatagcattagctctgactgtacaggcagagtgctgtaattatattattggccctattttgcttctgcaatgaatttcattgcctgcattgtaaaatcagcaggtagcaaagtttctgctaatgatttaatgtactctctgatcattttggacaaaagtcatggtaagatccacaaggcaattttatcatccccactgactactgcctggtttaagcattttaagtgaagacaaaacatgattctcatctccttgtttcctggtgaattccttcccacacagaagagagaattacttgtctaatatataatttcaggcataaggagaaggtgatattgcattgcaaataatagcagttagtgggagttgagagccagctctgcaccagactcgtatcagccacttgacctccattattccttattccttggtacytctgcgccatctgtgatatcagatccttttttctgcaaggaaactgaggctcggcgatactaagaaactcagccagggtccgtcagctgtcaagtggcattgctggcacccagattgagggccatctgactccaaagccacctgactctttcccatataccacagtttctaatacgatattataccaagctttaatatgagcacacctcctggatgatgctgtaaattagttgcctcccaccacaccacatsaagtataatggatataatatgatttttcagaattcagctaattacctactgagctttacattttgtaacttttttgactgtccatcaaaatgtctttgggattaaaaatttttttcatatgttttgaggtcaatttgaatctgagtttaataaacgttaccatgaaacatttctcccatctttttaggaaatatctgtgaataaactcattttgtgatagaaggctgtgtgtttatccagttttcatcctaaggagagggggagaagggaaataatacttcacgtctttattgcatgccaaacgtttatagacattatatgatttcatcctttaataaccccatgaaaaggatgtcattgtcttcacttgacaaatgagggagatggcagtgcaatcaagacatactgacaaggagaggaggtgagcgacttgcccgaggccacgctgctgataccttggcagaagcagaatttgaaaacagagcccccatatgttttaactgctcattggaaactgactaggtcacatactcctcctccttccctgtactggtagtttttcttttattttttttttaaatttcttccattttctttcctttttacagcaaatttgtagttatggtggagcaaagggcagttttcactcctcttccctaaaactgtagtttaactaaaaagtggccactgtctcctggtagcrgttggtaagccatccagtctctgcaggcatctacgctccaggtctccagtctgaggagtctsgctcctrgggcaggtgcctctgggggtctctgccaggcttgtctggtcatgcagctacttccagactgattcctagatcttgcatttttacataggacatccccagcattcaaagaagatcctgggaactggattcctaccagaggaattagaatgaaaccaacaaaactaaaaacgacaccctcccccatcccccgcatccgatacacatgcaaggtaatatttgatgtcagtaggaaaaaaatccagtgttataggagacaaaccatagcaagcaatggcctctcacccttcccttcacaccctccactctgtccacttgtttgttccttcaataaatactratggagaatgggctctatgccagtgtttctctggatgttggctgcagggatgaacaaaggcaacttctaggagaaatttctgtttttgatgctctcgtggctgcttcctgtgtcttaatattgtgcttaaactgccacttcttcagctgttgatttcaggcactatctaatgacttttgctgttacgagcatggatttagctcatttttaccatcttccctagttgtatcaccttcctcccattatgtttgtaacttcagattttgtatatttcrcatatgtcaatatgtaaacattttatatatatatatatgcatkcacacacatgcatacatatatgtaatggtatatatacatgtaagtttccatttttgctcaaattgctctggacagttctttgctctgggagttctttactccctttctcataagaagaggctgtttgtaccctgatcaatccctctacctcttcttttcccctttcacccgtaacttctgctacttatacttctgccttatcatggtccataacattcaccttccactctgtagccataattaaatctcccatgcatcccactttgggaggctgaggtggatggatcaccaggtcaggagattgagaccatcctggctaacacggtgaaaccccgtttctactaaaaatacaaaaaattagccgggcatggtggcacgtgcctgtaatccaagctactcgggaggctgaggcaggagaatcacttgaacccaggaggcggaggttgcagtgagcccagatcgcaccactgcactccagcctgggtgacagagcgagactccatctcaaacaaacaaacaaacaaacaaacaaacaaactaagaacarcaacgaaaaaactcccatgtattatctatggattgactgtaaaatatgagaagcaataaatatgttcatcactagggccatctagaaatttctaacccaagggtcaactaatctttccctgtgttgtatttcctgctctgcggatccrgcatcatgacctttgtactacccaggaaagccagtgttctcatgggctcttctcttttttatgctctaccagatgctagcactgtggcatgccattcgctcactagcagcttaaagggtacaggttctaaatctccttagtgctactcacctgttatttctgagcctgcgtagatgatcttcttttattcagacgtctgtgtcacatatacatgacatcctacccccttcccataaaaaaaatcacatttgtgaatgtctctcttaggctgagttccagactccaagatccctcttctctcttgtcagaatccagcagctgatggcatttatgtctgtagatttcactgtcaatgagtcattgacaggctaagcaggctgttggatggagtgatcaatggtatgagggaaaacactaatgtatgcaagaagagccatttcctagtaggaaaaatatttatgtatggagccacaaaggtgatcgcttcagtagaaatcaccaaggacctggtagtcaatgtgcaacctaattttctttcaaaagctgtaggaatggcaagggaggaaataaataatgcatttctttatatctcctgttttaagttactgagtgtcgccaagagatttctaaggccagacattgagtcagctgtaaaactggaaggagcaatgtttgctgactgttgcctcagccgctgaccctgatctcctctgcacgtagtaggcagcttaaaaattcctcgcccgacttctgattttcacgtgactcactgcttagttgtctgggtttgttttaattcctttccccctgctgacagttctttaagtggatgtctataaaggttggggcattcgctcttacaacaataggaaaagaaaggaggaaggaataaaaaagagagaaaaggaataaaaaaaagtttggtttagatgtctgatttctctgagcctcagtttcccagcatgtaaaatgttgtgagggctcacactggtcttgtccaggtgcttagtagagcatccattacaccataaagtatcacaaaaatttttaatatcatcattattactgtgctttcccttgagtttttttttttttaaatcagttaatccacatactggcagatctgacttccttgttttaggccctggggaatttttgttatctgtagagctggattaattttacagtgtggtgcctttgcccaaggtgaacctgtctgtttatagaaagtgtcaccaagttctgtcttgggcccgtccactcggttatatgtgctggaccctgggtggaagcactttgcacgtgtgcattcaygatgggctgtgctggaggggaaaacaggcatcactcccaaattctattcatgcaattaaaaattcctttcatttttatttgtgagagggtatgggtgcacagcagacggcaaacagaagaaaagcttttgattgaaaggtaaacatttacttctgccttttaaatagacatagcaagtctctttactctcatggaagcagttataaggaacatagagctgaagagaatatgaccatttctggtcttttactatgctcgtattaatccaccctggatagaagggactgtactatttggaaacacctaaataaaatgtttttgtcttaaggtgttaaaatgtactcattaatgtggcagtgtattccttttcttctgtgatcgttgaagtagggaaggaatttcaactaagaaccaaaatgattgtctgttaagacacttattttttgagaagacaaattaatataacattattatgtggggaatgtggaaaggctaaggttgtattgaaaacttattaagcttatgagaatattgaaagcatgaggaggcatgaccggaaggtattaatgatttgggcttgattattctaagactgtattctaagtctaaaatgttgataactaagacctgaaatgataaatgtttggcaaaaccaaataaatgagtagcaggttgaaaaaagaggcaagagagaagtagatatttatagttttctaaaacaatttagtcccttctggaagagagtcctacctcagccatgcctaccaggttgtgtttgtgggattatttctgagtcacccttaagctcatctttacccctctcccagacccccagtcccctcactgggcattccttggattatttatttatttatttatttatttatttatttatttattgtttgagacagtctcactttgtcaccaagtctggagtgcagtggtgtgaccttgrctcactgcaacctctgcctcccaggttcaagtgattctcttgcctcagccccctgagtagctgggactacaggcacgtgccaccatgcctggctaattttttgtatttttagtagagacgggattttgctatgttgcccaggctggtcacgaactcctaaactcaggcagtccacccgcctcggcctcccaaagtgtaatcctggattataggtgtgatccaccacacccagccttccttttgtttttgatttttcctctttaaactctacttgtaaccacccctttcctttcccaaacttttactagcttcttccatcctggacttgcaatctggctgaaaacctgctaaataagggaacaattttgacatggctcctgkactccccacaaacctagttgatyccagaccagtaatgtcttggggacagtgttgtcccatcttcctttctaggctgggctcagattactgacgtggaagagttgttggtcctggtgcaacatgccatgaccatgaggcctctggtagaaaggaaggaatgaagggtggttctccaaacccttggcccatgcctcatccttctgttcccttccttttccaggtacgtagctggtcaggtttcttaaattccgtcgatctggctttatccattttaagccttaggttgttggaacatagctaagttggtcaccttttcaagaattgaatctcaaaaaagccatgtagacctcggttgtaaccatcacattcattgacttggttgttgatctgtttgtcagatcagttttctgtttggggaacatttttgtaagtgcatgtatttcagcttttaacattttaaaaataaaatttcattgggaaagaaatttcattcgactggagtaccaggaacttagaatgaatccatttgtcagcagtatttataccctgtctaaaagagtgtcctcccagttctctgtctctgtactgtgtccccactttaaaaaatagctcaacctctcattatatttgcaattttttgtttttttcattgcctggtgggtttttttttttttgtctttttaaatgctccatgtagaaaagaattcctggaatagttcttggaacagcgtaggtgaataaatgagcaattattttgtcctcagcactataactgatttgagaaggtcaaaacagaaaataaaaacatgtttcagtagtaccagttcctgcacaggctgtctgccaactatggaagtaaagggaatagaattaggctgtctggattatagtgggaaaacaaaacacaatcacatcctgcctcagcctatccttgaactggtgtctttagaaaggggaggtcaagtaaaggccataaggctggatggtggggaagaaagaggcctgggaacaggtgagaaactgcagagcctggcggagttcatttaacctcactgtggttctgttggacttagtgcaaaatcaagagacccacctttgcctgcccatcctgcaatggtttggggggccccaagtagatgactggggaagatgactgggaaactgcagcactggttcatgttctgggacaaatcaatattaagcaagtttaatgatgggtaggttcattcaaaagggaaatatgtttcaatggagaagagaaatttgttaggttgtataataaatattttgagtgtatttggatagaagtttatgacggaaaaggcaaaattctctgtgtctttatggggagatattcgatatgttttttcttggcagaaataaaacatattcaataatatamttaggcaaacttgtkttasttgacaagaagaccgtatctccgtctgcaagatgaaggcaagatcaagagatgtcagttaacattcttgcgaccacaggtagggaggagaactggggaggaatttatggataggtgagagcataaaactagatgcggaagggatgggggagcaggtaaaataatgaggctcaatgttcaagaaggtcttgggcaagcgcgtgctagttattttcctcactggtgtggtcgtgacagatgaatcacattttactctcctccctttctcatagtatrattacataaaggagaccttccctggaaagagccctgtgcatggcttttgagagtgggcctgggctaacagtgagtgtggaagcttgctgccttgaattctttccaattctggagagttgatgggtaacaagtgtgtatctatagtctgcttggacatggcrgtgtggccactgacacgttgtcagccatcccctcaactccagggacaggaatggtgagaaggtggtgagggcacagtctgcccggagacgggacagtttgtactacctgtagcaagagcatgtctttgagagccatagcagctggcttcctatttggagagaacaagaatgtgaaaagctatttattaccagatgtgggcagaccctccagcctttttttgttcttttaaaccctaatctctttttaaaattttttttatttttaatgtttatgggtacatagtaggtgcttatatttgtggggtacatccgatgttttgatacaggcatgcaatgtgaaataatcacatatgaagaatggggtatccaacccctcaaacatttatcctttgtgttacaagcaatccagtcactcttttagttatataaaaatgtacagtttaagttattattgactatagtcaccctgttgtgttgtcaaatagtaggtcttatttattccttgtatttttttgtacccattgaccatccccacctcctcatcaaccccccactacccttcccagcttctggtaaccatttttgtgctctccatttctgtgagttcagttgttttgatttttagatccaagaaacacaatcttagatgcatagtaggtgcattctgttgccatctgcatcatgggactgcacaatcggagaggcaggaaggccctgagaaatacctgattacacacctgcgtgctgggatgagaaatatgaggggaggagagaaaagatgagcctcatattgcatagcaagtctgtgatggaagcaaagttagaccctgttgatttttatgtcttacctccttgccattagttaggtaaatttagaccaccatattttctaagatcagagaatagagaattttaaattctagattcttgccttgtggatgttgaaaagaacaattaaaagttatttgggatatccaatcagttaataaataattatgaatgaataaactgttttgttgaagacactcttatggcagacatgaacatggggcttaaatcagttctgacatctagaagctcaaatccaggaggcagaggagttggatattaaagaactctgtggtgagctggacaggatgacatgacaattatggaagttcagagcacatagcagtcttttccagtgatggggatggaatgtgggggtcatggaagactttgtggaagagttgcaagtagaattattactgttgaaaagagatggggagttaggtagacaaacagaaaaaatgccaccaaacaataagttaggatagaaaaactccacgtatccatatgtcagttggcccatctgttcgttcatacatcctttcattcttctatccatccaaccgtccttgcatccatctatccatccacacaaccacttattcttcattcatctgcccatctgcccacctacccatccacccttccatacattcatctagtcatccccatccatccactcatctatccacccatccatccacccatgaatctatccatccatctgccaatccacccacccttccactcacccacccatccatacacacttccatctgcctttccaattatccacccttccatccatccatctacccactcatctaccctttcatacatccatacacatccatctgttcattcatctatccatccatgcatccttccttcgttgttttcttccttctatccatctattcatctacccaccccacccacctatccttcacccatctggccatccatccttctacccacaccttccttcctaccttccttccttccttccgtccttccttccttccttccttccgtcctcccttcctcccatcctcccttccttcctcctgtcttcctttcctttccttccttctctttctttcttttgttccttcctttctttcctccctccctttctttcctccctcccttcctcccttcctgtctccattattaacttgctggtattttgtttcaccattgcattgtgtttatcaatagacgattaatggaagaagagaagaaatcaggtgaagtctttgtaggatctagaatgtctaggctaaggagtttgaaattttttatactatgttctattgggaaccatttcagggttttgagatatagtatgatataataacagctatgctaaattctttgaagttattggtrgtggaatatcaatccagaatgaaaataaataattttggaaatgagcctgtcattgaaatatactttatttctcgttaaatgtcccagcaaaagtattttggttgttaaaataaaggaacaaccattagaaaggaggaggagaagaattagaaggaaaaaaaaggtaaaggtaaagtaccttggtattttagggtttctaagattaggaactttaaatgttgaccccattttggtctttaccttcaaaagacgggagaaagactgagagaagtttctaagctgatgctgctctactacctggagtaggaatgagaaaccatctataaatattacctttggtgtttccatcaaaaatttagaatttcaccctattctatttttaattctggtttaagactgaaggggttcttggtgaatacttttgtagatacaattaatagttatgaaaatcattactgattacctccagggttcagatattgggctgaatgtcttctctcaccatcagaactaccttttgactagagtgttaattattaacatattttagattagtcagacaactgcaatatttaaggaatacgtccaaggtcacacaactaaaagaagtgacaaagtacggtttcagacccttttagtcttttctgtgttgcaaaattgagataatgataatagctaatgatacctctcccttactgataattgaatgttttatgtgaattaaaaagtttaatctgcatagtgtttcatcaagatagattccttgttatcctcattttggagatgaagagactcaggcatgcaaaggtgaagtaattttcccagggccagagggctaaggaaagggagaattgggattaattctacattgtctactggtaatacctattgctcatttttaccagttaaaactatttaatgagcatttgcccactttctaaaaatatgatggtcttagttacccacatggacctactctatcccaggcagatgccacaaattattttgttttctttttgtatatatttatgctgtttcctcatttttaaatagtgggctttgatgactattcttctacataaattattacatatctgtatcatagaatcttaaaaattatttgattcaaatgtatacataattttcatatccctgatagatattgccaaatatttaccagaagtgaatcaagtagtttttctaccaacattatctaagagggcttgtcttattacatctttgtcagcactaagtattatctcccttacttttttttttttttggtaatctttgttactttgttaggattaaagtagcttctcattttaattttcactcctttaattgagaagcagaacgtattcttttttggtgacttgtttcagagtctctttagtttgaagatacaatagatgtagcatctgctatatccggtaacaggataacagtgcattgctgggatgatgaggctgcagtgggctgtgattgtgccactgcattttcagcctgggtgacagaggaagaccctattacaaaaaaaaaaaaaaaaagggtctgttatcaaccatgcttttttattttattttattttattttcctgtttctgagttagagtctcttttgctcaggctggagtacagtggcgtgatcttggttcactgcagcatcaacctcctgggctcaagcaatcctcctagctcagcctcctgagtacctgggattgcaggtatttgccaccacgcccagctaatttttgtatttttagtagagacagggtttcgccatgttggccaggctggtctcggactcctgacctcaggtcatccgcccgccttggcttcccaaaatgctggtattacaggcatgagcctctccatctggcctcagcagtgctcttctggctagcttgatcatatgccaatgttttattccttcgtggagctcagagtaagcttgttttactggacgttttctataataaagctaggggatggcgaatcattctaattaccaaaaagctgtctttgataacaatgtaggagataacgaaggcagaaataacatttgagtaattctttgccattctgtctctgaatcttgaaataaatactcttgaatttatatgttcttggtcctttaggagtcataaaaacataccgttacatatgtatatgaaacggtgagaaactgcgtatttattaagagtcacgacccttaggactagacaaatcaaattaaatctcataaaaacctgttatggaatatgaatacgtggcactattttttcttttagggtgtctttattaattttgtcatgtttaatatgttgcagttgcaaacaaaggcataaatgcatgcgttcattcctaattaatttatgtaattgggttttataaatttagctgtttaggaagctgtgcataacacactccatttactgtgtgctgtagccaataaaagcataatagaaagaaatatagtttgaagctcacttcaatggtaaatatagattagttgtaaatgatatctttgtaatgtttattttaaattttgcagtgctgcagattttctgaacataccaattaatgttcttatttgaaataatgactagttaattactataaattctaagtgctccatctctgacaattaaaaattgtcttacagctttttatttatttatttattttttttagttctttccaaattatattaagtgcagcatctggggaaagaagaatgggaatggaaggagtgtgtttaaaatgtgggtggttttgtcaattcctattgggaatgcttgtatttgaatgtatatacatatgcatatttatgtgtaatgtctatttcatgctaaatagggagtgatcaagttgaaaaataagaaatgctgtttgaatttttaaaataggttataaattataacatgaaaatcaaatacaatgggtaaaaccagtaaattttaaataagtttacatttgttgtcgtgatgtgactgtgacgttacctgagatctcagcaaggagctctgcagcccgaaaagaccaactggaatgatttgatcagaaagggaatgggtattaggctgctccactgatactttatccacttcgggagagagagccctgttccttcttcatctagctcaagccaactgtcagaaatgcatgtcagagctacacaattctatccaaggcattaactgttgtcaagtctgttttttatgaatatgtttcaatataagaaattgtcttaggyccaaagtgaaacgtcttcctccttgactcatagcaagctcatgcaggtatttgaacattgttctgtataatatgtgcacctttgagaaatcccatgattcttgctattctttgtaaatctaataccttccatccagagagagagtatacatgtggagtcaattgggagtaccttttgtatcctctagtctgagccttacaggttaaaggagaatgttggatttgcttttgaaagtatgggcttgcggagattaaaaaaaaaaaaaagaaaccttgaataatcatgtacaaatataaatactgtatgtagaataagtgtaatggatcacatttatgatgaaatatgtatgtctttccaagggtaagaccttcataattcatttataagttaccttctttctcttacatgtaagtagcagaatagtaattttcttcgttctttctgaagaattgccacacagggaatgaaaagaagaaaggataaacttttcttaaacagcagaatgttattcagagataactggaaaaaagtacgagaaaagccaaaaagaaaaaaaaaaattgtgggtcctggtgatgttggaaaaatgacgtgtgagctgaagttccagacgccgagcttcatctattttgtcatgttatgacagaaatcattacaagggtgataggtttatttataaagacttgcttcaatattcaaagtacatctattctagcattcctcattttgagccaggctgtggatcaagatgaaagaaaaattaaattgtatattgaagagctcttaattgagccatgctgtatttaacagggaagcatcggcttcaggcagtcgataccactgaggatttttaatgccctgcatcatgagactgtcagtttgctttggagaatgcaaacaggctaatgacaaagccctgcaaacttttgtagttgctgctggtctctttggaaggcaagtgctaatttacccacagttgaaacctgacacacacacgcgcgtgcacacacacagacacacastctctctctctttctctgtctctctctctttctctgtctctcataaggaactaaatcctgcgttttctcaccagagggctaatgacacactgcttagtcacccaaaacctgtttcctaaggagccactttggggcttgtttaaagtttttaatgtaaggcattatataatattagatttcccctgtttttccttaatcaatgtaaattcaattgcatttcagagggtggccaagtggcatttcatcatctctaatatccatttaaaaatgttaggtctacccagttataattctccaaagtagcctatctgtggtttaatatgttatctacattctctaaggcagtgttaatttccttttgtagttaatctatcctactaccaaatttagtatatttatagttaaagattctgttaagagctaagtgatttaagtacatctgggataaagtggccttggctttaactatgaaacaaattttctttatttcattctcttcactgataaatccatagtaactggaggcatttttagaattgtgggcaatttcagcctctaaagtttgattaaagatacttcagatattcctactgagaggctagagggctgaaaggaatttattttgggttctggccctagtgcagctcagtggaagagaacagacattgtgagtttaattcccacgctgccaatttcccacgagtctagggtgggtgttacttctcaagaaggcgatggtagaaccgctggagacttcttatggctgtggcaggggactcacacgtcacaaggagtccagaggcatggctttgaagagctcttttcattcattcttccttttgttcacttgtacatcaaatacatgctgtgggcctactgtgtgctgagcactgatcttgtcaggttcttggggaagacttcattgctgaggtgacctttgagctgagtgtatgagtgcaagagagagcgatcacacctgggaactgcttaataaagtccccggcatcttgaagccacttgcagaccttggcagttgctgttgctcctgctgctgctgctgctgctgcattgtcaagactacattgatgtcttggaaatatagaaaaaagaggmtgctggactgtgtgcttagaatcwgtgtgctaactctgttaccaacaccgtagagaagtggttccagaaggaagagttcagggtgagaatgaataacggagtggctttgcagtgggaacctggctttgcagcacagctaggattggagaagatcttcccagcagggagaagaactcaaagaacatgcatgaagggaggaaggttgcaccagtgggagggaccagaatatggtgtggaaagaacgaggttcaaatccaggctctgtcattaactgcccctaccctctctgagctgagtttgttttggacactggagataatgcatgttaacatcctggtagctctatttatttgctaccatggtacataatcatgggagctctatttatttgaacatcttcttttgttattatttggtgtayttgggaaaggcatgtgggagcagcaagcaggtgagcatcctgtttggaatgcagggccgggaactgccctgcccagtccagcctcattccagaggctagcacctggcctcagctgtagagctgctgggagcatttcagctctctgcttctttggcagtctagtgctgtcacagaaggaaagctcactccatggaaaaggggggattgatttcttctctgagggcagaggctgatcartctaggctggtaggaatagatgtaacctcagaggaaacaatttgcattggcgaaagcaagtcaatggccatccccaaattcaaaaggacagggaagtgtaatcctactgtgatccctaaagcatccaggccccaggaatggtggtgatttgccagggggaaatggaggaacaaccccttctttgactacctctgtagtttatattggattctgcaaagtcccatgaggactgatagatgggctgtgtctgcatttgaattttgtagctgaaatgtgggtgagttcacctaggtccccttcatgacaaggtggtgagaaacattttcttgttctacaaatctgaattaggtccacgaaagagggtatgcagcatagagaggaaccaaaaaggacgcaagatttaggatagatattgccccttgggaggcctgcctggtctgcccttgataactcatgaacagtctggtaatgctggaaggcaaagtaaaagccaacctcttgagaaagacatggaacacaggatggaacttgaactgcttaaaatggcttttctcaggccagctgcactggagtgtgctgctgtaacaaacacgcccggatctcagtggcttagcatggtgaattcatttcccattcgtgatatctgaccacagatgggaggtaaggggctgtgctttaaagtcattcatggatctggctgggcccgatgcctcacacctgtaatcccagcaacttgggaggtgggcggatcactttaggtcagaagttcgagaccagcctggccaatatggtgaaactccatgtctactaataacacagattagtcaggtatggtgacgtgcacctgtaatcccagctactcgggagactgaggcacaaggattgcttgaaccgtggaggcagaggctgcagagagctgagatcatgccactgtactctagcctgggtgacagagcgagactgtatctcaaaaaaaaaaaaaaaaaaaaatctttcagggatccaggctgacctcagcaccatctcttacatgtgcctctgttctttccctaatataagggagcatgggggattagtgtctggcttaagcacttccactcagaaatcttgcttctccccacaatccattggtgaaagcaaggcaatggtcatgccccaattcgaaagataagtgcagtcctactgtgtgccctaaagaattgaagatcaggatacttatgagcagcgctcacaactgccatagtggcaatgcgaatggcatctatttttaatgtgactgagaaaataattggtcagatattgcaggatttttgtgggggagagggtggaaaagaacttacagattaaaaaaagaactggcatagcacctagattttaaacagaaggaaaagatgacattggggaccagagacagaaatttcacttctgtgccatgacaaataccagggagatgtaattgcaaaatgaagctgcaaatgtcttacccagggaactaggtgacaacctgcttggcttcatgaagaaggaataatatccaattaggctaagtgtattcggtgcctgagtgacaagccctggagacctgagggcttctggggcccccagggcggtttcaggaggctgtctccagacctgtccggggtgtgagcatgtcacgctgtgrcccgcgcctcccctgtacagctgcctctgctcttctaagcactgaaatgagaggtgtaacctgtgttccagagtctgcgcctcccagccactggggcaggggcacctggcccatcagacttaccttgcctcccctgctgcccatgccctgctgcctagggctgggctcatgactgggtccacatcagctccacattgcagactgaccccctggaccctcacgtctcaggatccctatctccctgtcagtgctttgtcacccaaagtcaccgcagctcctcttgagtgctttcaagatcagaccgaggggtcctagttcaagctaattcctacctgtgcgatcactagccaagtactgaacctctctgaacttcaattatctcatctgtaaaaggtggttggtttgtaattgttcctaccycttagggcttttgtgagagtttagatgataaaccaccaagcaacagtggctggcattctgtgcacaatcgawgtctgctgctgtcagctctgtggtcgctgtctgcactcccacccctgtcatcctccaagtctgatctcctcccgaagtctcttcctggacctcagccctcagggattgcacctccctctgaatatgctgtcccttctaatcatgccatttagccacactgcctagcactttcttttttgaatattcgtgtcccaggtccctgaaaaagttgctaagcctgctaaaagcaaggcaaggcctttctttctttgtaaccttaatgcccagcaacgctccattcagtttgaccctcagttggcttcatactttgattttatgtctttatttgtttcttaatgagctactttatcattgtgaaaacagttaaatatcaatagtcaatgaataaatattaccaaaaaaaaaaaaaggtttgtcgtttaaaaatttggagctgggctggaaactagggatactacttggtatattttagttctactgatatgacagtatttgatacttaatcatattcaagcagctttacagagactaccatgagaatgggttaaattaagaggattgtctttgctgtttagccaatatgggccaaagttcagtggtttgagacatggcggggtttggtagtagatgtaggatattgctggggaaagagtgttagaggatggaagattgcatgatatttctggctttgctctttgactgtgtgctgtttgtaaaatcacttaagtcccatgggtcattttcttccccatatcaagcacctgctatgtatcaggtgttgtgctcacgtggtgttttatgcacagtgtttcctctttgttaatcctcatgatgattggtatggtttggctgtgtccccacccaaatctcattttgaactgtaatctccataatccctacgtgccaggtagggacctggtaggaggtgattggcccgtggtggcagtttccctcatgctgttctcgtgatagcacgtgagttctcgtgagatctgatagttttataaatggaagtttcccctggccttcattctctttcctgctgctttgcgaagaaggtgcttgcttctgctttgccttctgccrtgattgtaagtttcctgaggcctccctagccatgcggaactgtgagtcaataaacctctttcctttatacattacccagtctcgggtagtatcttcatagcagtgcaaaaacggactaatacaggttgggcacggtggctcatgcctgtaatcccagcactttaggaggccgaggcagatggatcacttgaggtcaagagtttgagaccatcctggccaacatggtgaaaccctgcctctactaaaaatacaaaacagccgggtatggtggtgtgtgcctgtaatcccagctatttgggaccctgaggcaggagaatcgcttgaacctggaaggtggaggtttcagtgagccgagatcatgccactgcactctagcctgggtgattccatctcaaaaaaaaaaaaagagaaagaaaacagattaatacaatgatctgtgagatattgggactgttcttattcccatttcacagatgagccactaactggctcctggcaggacagtgaataaggggcacaacagagacacaaacacatsgctaaccaatggtctcatccgtcagccacactgcctgtctcagcatgggccctgtgtggaccattccatctcaatttgtttctgattcttgtcaattcaataagaacagctgaaaagtaaaataataaatatatacataaaaacaatggggggagtaataatgataatagatacaattttttggtctttataatccccagagcctggcttaattattttaaagtaaatcaacactttgaacacttgcaggttagaaaaccagtggactgatggatgcgttacagccattgtttccaagtgtattagtttctgctggccgctgtaacacattatcaccagtgtagcacctaaacaacacaaatgtattgtctttcagttctgtaagatagaagtcctacagggttctccttgggctaaaatgtagttgttggcatttctttctggaggctctgggggaaggtcgttccttggccttttcccatgacgtagaggctgacacattcctctkctatggcctcttcatttttcaaagccagcaagattgcatctctctgtctttcttttgtggtcacattttaccaggactcttctcctgcttttttttttctacctttagggatctttgtgatttcatttggcccacctagataaccagggtcctctccctatttatttttattttatttgtgagacagagctttgctttgttgcccagactggagtgcagtggcttgatcttggctcactgcaacttccgcctccagggttcaagcgattctcctgcctcagcctcctgagtacctgggaccacaggcacatgccaccatgccagctaatttttagtagagatggggtttcaccatgttggccaggctggtctcaaactcctgacctcaagtgatctgcctgccttggcctcctaaactgccgggattacaggtgtgagccaccacacccagcccctctccctattttaatgcgaggtaattaacaaccttaatttcaccggtaacctgaattctcctttgccacgcagtctaccatattcacgggtttcagggattaggacctggacatctttggttgggaaatgggcatcattttgtctaccacaacgtgagagcccattgccctgcatccacagtcataaaagtctgttcccttcctccctgattcttcctaacttctcctgcctgccttgcaggatatgtggagttatcagttcctagcaccactggccaaagcgaggatagctgattgcactcctactttcctgctggtggaaacagcatgtatataggtacaactctggtgtggggaaaatgctaaagatataaagtagaaatagcctttgtgtgatgtgagcagcagaacaaaaatcgagggtgccaaataatcgtatgaagtggtgaactgcctaagatggaatattgctgttcctaaatcctggctgtgttgagacatgtgatcctgccgatgagatgagagctgaaccactctcttctcccagatgctgggcttccgaccttaatagagaccgagaaacttaacagagggctcagaagagaaatctattgaaagttactaggtgccaggtgtctcggaaagtgtttaacacatgcctgagacgttaaaggcaagattcatgcattctttcagcagacagtttcttcacttaccggggaagggggtgtaatatatgggggtatagggataaataattctgtgtgctgtgcaggccgtggagactcatcttctgcacaggtcaagttctgaagtcagcatataagctggaagtggagtgaagtcaaatgaccctcaaagatccttccagacttcatgcccttggcaactcagtttggacactcatatgctggtttcttccttgtatttatgcagcagcctccttttccacaaaaagcagaggccaacgtatctcaccccctcaatttttttactttccctctccctccctgtgcttgcctttcttttcttttcttttttctttttaagacaggctctcactcttgtcacccaggctagaatgcagtggtgcaatcacagctcactgcagcctgtaactcccagactgaagcgatcctcctgcctcagcctcccgagtagcttgtactgcagatgtgtgtcaccatacctggctgatttatacttayatttatgtatgtgcatgtgtgtttatatatatatatttgtagaaatgggattttgccatgtttcccaggctgggctcaaactcctgggtttaagcagtcctcctccagcctcccaaagtgctgggattacaagcctgagccaccatgcctggcctttgcttgcctttcttaatgtctttgacaattcatgtaaatgtgtgtatgatgtaactctataggactaagggtgtgtgaggatgccaggaggctgttggttgacaggagtcatgatttgactatatgaggtcacagaaaatgctttttaaaatttaccgccaacccacaggaaaactattctccttcttctaaggaaaaaaaaaatgtcacgataaagcagctacattaatgacaggcacatcaaggttttaacgtgttctctagatttatgatgtgtagcgtggtctccattctagaaagcaaagtagggaaagcacgactttggggccagggccctttctggttcagaatgtccctggccagtgtgcgccgtgcagtgtggaagcacgcttcggtgcgcrtgtaagtttacgtgctatctgtagggacagtgatttttattcattagagtttttgagtctaattgtttttaaactgccacttttgtttgttaaagatacagatgtctggccatagaggaaagcaaggtggatttatcgttgcaattagatgcttcacaatttgaaaacttatcacttaaattggtgaaatgtcacttttatgcaacttgatgtttagaagtccttggcgtccaggactaaagtcatgtgcaatttaacaagatcttggtgagataaaggaagttgcgcttgaggaaacattgaaacacaccagatggaattttccarttccctcctacatgatagagactaggtgaagggagatagaccacaaattgattttgtgtaactcttaaattaagtggagcagagttaaaaaaaaaaaatcactggatttgaagttggcctatgttagattactccaaggaagttagttaatatgttaatatgaatctagatgaacattgagtgttttrctcttcttgttaatttgcgccatctactaatctctggacaatggagaaaaagtcgtaggttatgagttttttatttatggacattaagcaatatctttaaaatgtaaaatgaagccgacaaaatgcacagccrgataacaacaacaaatctaatctaaagtgacaggaagagactctcccagacatttttctctttaatgtaacatgactttaaattgatgcaaccccacagtgattgaaaaactctcagagcttgtctcctatgattacatttctgatctgtacaacttaattttttaactcggtgagtctcagttttgcgaatgaacagttctcttttgctttctctctcatattatttgggaagacattatttggcaaccaggcagataaagctctgttaccacgacgaatactgagaagtcctaaaacaataaagaccccaagaactcaccctggaatatgtacctccaaatctcttctcttttccttctctccttctctttgtttttctttctcttcctgttctcttgttttatcttgacttctctcgactgtggtgacggtttgcatatatctgcgattgtactgaaacttaccaaacattgtacgttttaaatgggcaaaatgtatttgaactatatatatcacaataaagctataatactcttttaaagtgtctcctgaatcattaccagtataattattctgtgaactgtattttgatgaattcagaattaatttaaaatggattatccccctgtagaatgggaggtaatgctgaatgattgtgaatgattgtgaatgtttgtttattcggggtactccctcaaatttcttatccagtggtgtctagaacatgttgggattttgtgtgatagtttcttgagttggaaattgcgtttctttggcctcccatgtgggtatcaatgagttttacatggtttaaaggccagttatgtgatggatacttctattaccttatgtctttctgatttcatacacttaaatgtacagtttttatcttccttcaaaaccttatttttccragcaagttttatttattcactttcagtcattactgaagtgaataacaaacatataacagatgctattttgggtcatagctgttttgctaagtaatacttaaaggctttctgactatatttttaatttctcgacagtctcccatggttattttctgatcataacttgaaaatcaaagctttctgttcagtttaaccatcttttaaaacccagtggttttagcttgggtattaacctttaacatagctagcgaaaattgaacatttttatttgaaatatgcttaatgttgtcttgtgtaagacaaaaagtttagggacaagtgaaccatttacttttcttttaatgtggaaagcagtttacaaatgctggtatgactaacaagaatgaaaggaccagaatggcagttctgagctagaatgtgatgagtaagtaccaccatagttagcggctagggaagggaggttgttctacagagaaacatgcccatcatttcttctgttacctggtattcactctggcaatttctttttggactcattctaaaatcaggattaaggatatccactgagaagcttgcatttattactctaagcaagaaacttctatttaattttttaaccatttgattcatatgtatttagattttaaaatttcattttctcttatccaaatgtatcatatatctttaagtaggtgaatcttggagtagattttattatatatcacatcacagagttaagctcggttcatctggattttaaaaatctctacagctttgagaatgactttgaaacactctttactgttggagcttaaagaaaataaatctctaatgtcctctgtattaattcacctgcttggaaagttagagattaaaaggtttagtaggatttttatattttctataatttctatttgtattggagtaaactgttcgttgtatggagtggcttagctttcataaaacagaaagattcctatattgagaaaagaggaagaaggaaaaagtgtaatataaatacataaaacttcctctagctttcttgtgttatgtgtaaaggagttagtacgttactttaattgtgtactttgaagaaagcaatctcctatttccattaatggtggactctgtgggtagagacatggatatttttccttttataagaaaggtcttgtctttcctcagaaggcattgtgagcaaaataagggaagaaaaagagaagtagataagaaaaacaaatcacaatattgaagcaggacccgagtactatagccttcctcatattttggtatctggaaccgaggttgctaattaatgacccaagagctaagccttgtttgatgaaatgcaagatgtaatacacagattgccttggagtgatgtgtgattattaccatccattcatgtgtaatcccgtatttggaaggtttgtaatttgtttttgacacatttctctctgattttatacactcatgcatacaggtctcacctccctccaaaaccttatttccaaagcagactttgtttgtttggtttgggtaattcattgggccctatttgtcttccttatacataatctattttcttactgctgcctctgtcttccaaaccaagaatataaagaatgaagcctggggactggaacttaaaacttctgccgagaaaagaaagtcaaggcctgtgggctcctaaaacatcctgtggaattcgcctcagatgcccctccatttgcactggtatatggaggatgtttgaaaaccaccagaacctattgtgtactttggaacaatggcattttcctgcttgattgtgaagatggccgctggaaaagaagccaactcccagggggcacgaggggctaagctgtctcctgggaagtttgagggaggccaagtgttttccagttcatttccaaygcgtatttcttcagggccaagggcccagctgtgcctcattaggggtgagagtttggctgtgacacgacttaatagaaaaaaaaaaaaaaaaaggagaagtccaactagctgagtggcaacagaacttgggacaacctgtgcccacagcctttcatgtcctgtaatgagtgtgccatttgctcactgggaggagaaaaaaatgacagtatgcaacagtcaactttttcctgaagaaagagagaaaaaaatacatattttgcagccgagacatcggggtacctgttaactttaggcacagcgctagtgtcagccctggaaagagactccctgtgaacagcactttttaccatttaatcagcctgtacttcttcgtatttatagccctggcgaggctggcccattgttacaagaggaaattgtgatgttcagcagtttataccttgggagctggaagcgtttctccatggtgaatttgtaatattaattggccatgtcagttcatgacaaatgtagtracatctatttcaagtatttcagttttatggtgctgaagaagtgacacgcgctccagataagtaatctcacaaaagatcttcccgctcgctgtggagcgcctccagaacatgctctcagaggagatgcaaataggctcagggttcagggggctgtccccttccttttgctcaaggctcagaggggagccagaggaatgcagggagggacgcactccctgtcattcccctttcagtctcaggagattctggttgaagctctggcatggactttcctgcccaagaagtgtccttgcggtgatcatttatgtgatttgggtacctgctgcttgtaggctgtgactgtcagtagcagaaataaatatattgcctttctcactgtgtacagtggtgctgtaccaagggtgactctgcccatcaagggacacttgtctggagatatttgggttgtcatatcttggaggagaataggctgctattagcatctagtgggtaagagcaagggatgctgtagaacttcctacaatgcacaggcgcatcctacaacagagaattgtctggccccaaaagtcaatagtgctgaggctgagaaaccctgcacttgtgtggaccatgcccttttatgcttttcaaccttgaagcactaataggtcagagaagaatgccagggatgtgttgatgggtctgcaagaggttgatgggggatgcttgagctcctaccaagtggaaggtggtgtaggcaaagagaaggatgcataggcacattggacggtggaaggcaggggctgctgaatgatgtggcaggaaacatgcaaagtgctcagcgtccctgggcggtgcagagtcttgggaagcaagaggatggagccatcctttcagtttccagcctgggtttcccaaaggagagggtgtttgagttcagtggcagagagagtggggaagagtgttggagcccagctgagtggccacctttgtcaaatggagctgagaaatgattttcacatggctggcgtaatggcggagtttccaaaacagcagcacaacaaaatagccatttacatgtcaagactatattcatagaatccatatgtctaaggtggggaagttgtcattattcctgttttatagatraggaaacagaggcccagatggagtaagtgactgctgaagtacacatgatttgtcagtagaaaggaagagaccaaaggtggcatcaactttatctttccttcttttttttgagactggagtcttgctctgttgcccaggcaggaatgcagtggggtgatctcagctcattgcaagctccgtctcctgggttcacaccattctcctgcctcagcctcccaagtagctgggactacaggcacccgccaccaagcccagctaattttttgtaattttagtagagatggggtttcaccatgttagccaggatggtctctatctcctgacctcgtgatccgcctgcctcggcctcccaaagtgctgggattacaggtgtgagccaccacgtccggcctgtttttccttctttgttaagtggaacaagtcatttttttggtggtcatttccaatatgtaattcctgataacacacgtatatattatctctttaaaaattaaaaaaaaaaaagccagccaaaaaaagaaaatggaagtgttcaagaaactgccttttttcatgtaatagtatttctgtgtcactaaatccttcaacagcattatttttaatagctgcccaatgtcctaatggatgggtgagtcatgatttacttaaccaatcccctgttgttggacatacaggttattcacagcttttctctattgtaagtggaattgcaatgaatgtttttgtagtacacaccagtgagtgattccttggtgcgcttggaagtgctggttccaagaataagataaggctttgagattaattgccaaattgctttcttgaaatattgaggctactattttccagtatcttcactaggaataagtaacgtttttctaaagctgagtagtaagagaaaggtagaatctaattttactgtgcattttcttgattattagtgaagctaaacattattttttattgatgtgttaacaatttctttcttttgcaaatgatctattmatgttctgtgactgatttctatcttggtgtctttacgtttgtgaatggtaagaatttttatgtgttcaggaactatttaaatgttcaagacattaacctgtggttatgtatatcacaggtacagtcacatcgcttaacaagggagatacattctgaaaaatgtattgtcggaattctgtcattgcatgaagatcatagagtgtatttacacgagcctagatggatagcctactacacatccaggctatatggtatagcctcttcctccagggctatgaacctgtatagtatattactgtaatgaatagtgtaagcagttgtaatacaatgggacatatttgtgcatctaaacacacctaaacatagaaaaggtacagtgaaaatatggtattataatctgatgggatcggcattgtgtacatagttcgttattgactgaaatgttggtatgaggtgtatgactatgttttctcatgacctctgctttttttgtctttaagtttttaatttttgttttacttttgtcttttaattttaattctattgcaaccaaatctatcagcctgtcttctatgatctctgcttttaattgttacsctttaaaaatccttctccatggtaacattatattgactcatatgtcttactggttgaacgtgcctatgtttgactttgaaatcattaaattcattgaggatttgttttgccatgaggaattgggtaaggatccagctgattttctccagatgagtagttcattgtcccaacaccagttattgcaataagttattccttccccaggaaatatacctgggctaattaagaaaactgtgcttcaatgtaattattccaccttaatgcatgaaatattaggttaacatggaaaaaacatggcatcccatgttttagtattttttccttatttccaagcagcacctctctttgaattatattctgttctstgtttttataatttgactcccttctattctacatctaaatagtgcattgtctgttttcactcaggactttaaaaatagttctagtactaattgtatttttattctaatactgctattccttttactggtacttctgcatcttaaaaaaacaaaacaaaacaacgaaaacttggcatgttggctcacttggtgaatgaaagcatatactgttcagttgtttattcttcagcaacatctgagtatcctcgagaaatgagtggaatgaaccgctagagatgaatagccttaagccctcaaagctgagccctttggggtaacttgctctaattctgccctctccagtttgagtttaggttaaattcagcttgcagattgcaccaagcctgatgcctcccagccatcaaggaaaagggtacctaacattttgaatctccattaatcttacagctcagatcctgtgtattaaatctcagcattttcagggatgtatactctggcagaaaaactttaatgattttttttttctgatgctgcctagaaaatattagaaagaagacccttctttcctttcctttcttgtcctgtcctgtcctgtcctgtcctgtcttccctccctccctccctccctcccttccttccttccttctctccttctcctcctcctcctctccttttcttttcttttcctttccttcttcttcctttcttcctttatttctttcttcctgtattattttcttgtatagctcaggtctcactgctttgctgccattcttgtggagaataataggtaacagaggtgtgcacctggcctcatttattgtcacactggataggtaatagacgccggcatggctatgctgtggttcctgctgatgggcacactattacaggtgcatgataagtgtgtcgtacgcaggaagtacrtttcccccagccttccctacctgctgagggctgctcccagcstaaggatttcatccagatagattcatagcgcttccagtaaatgcaccccttgcctttcaaagttgaaaaagaaattactttggacacaaagaggtgtttcttttgacacagcaggcatgtgaaaaaataagcaaaaaaacaagagggatttctgttaccattggcatgtgcttctcttttacttctttagttcacaatgccagtggttcagcttcccgttctgatcctcactgctctaatctcttcatctgtgcttgcaatcacagccacgcgggctcgcaatattaccacgaaatcattttatctgttggaatctctttcctgttcattactcttttttatccccaggtagacaaacaccctaagtttacctcttgcgaattgtacgctttaaggttaaggaattcgtagttgaataagaatgacttttcacataaatttaatggagttttatcttctgagccaaggctttatttaaggagtcttgggaggtaatcatgtgttacctgagactctccgcccataggatgtagttcctttccattggaacacatggggaccgagggaataaagaatgttttcatctctgaaaatayctctcattcttccaatcaatgctgctcttttcttgcatactgtatactgggaagcatttgtttcgatttgtggttaaatgtatgtgtccactggacttcagtatccaccctttgaaggaccgcaggagaagttgttcaggtagaaacatacaagggccggatgyggtggctcacacctgtaatcccagcactttgggaggcctaggcgggtggatcacttgaggcctggagtttgagaccagcctggcyaacatggtgaaaccctgtctctactaaaaatacaaaaattagccaggtgcggtggcgcaaacctgtaatcccagctacttgggaggctgaggcaggagaatcgcttgaactcgggaggcggaggttgcagtgagtcgagtcgtgtcartgcactccagcctgggtgacagagcgaaactctgtctcaaaaaacaaacaaaaagaaacataccgggagatctggttctattgaaccccagtgcagccatgggtagaattttaggcttatttatattccatttcaccacaagatgtcaccagggcaccacaccaacatggtctatggaccctctctctggcaaatagagttatggtcatcaaacagcacctgcccagggctatggggagaggaagctggttggctttgtcacaaatgccttgatgtctctttcctcccctggggcccatctcttccagcctttgcatagagagagaaggcaggcaacaggacacaagaagattttcccagagtccagggtgttctcttacccctgaaatcgtttcttcactggatgggaaggcaggcacccagggggagatggcatcagctgcataaacaatttttctcctcagtagacatttacatgagtcaataggaatcatattctctctttttttttttttttttttggagatggtctcactctgttacccaggctggaatgcagtggtgtgatctcagctcactgcagccttgacctcctgggttcaagagatcctcccacctcagcctcctgagcagctgggaccacaggtgcttgccacyatgcccaactaacttttgtattttttgtagagacagggtttcaccacattgcccaggcaggtctcaaactcccgggctcaagcgatcctcccaccttggcctcccaaagtgctgggattacaggtgtgagccactgtatctggcctaggaatcatattctcttcactgaaacatttcagatgacttaaaaattcaccttgtagaacttttaaaattgaaactttctggtgaacatcattagttgacagatrtrtcattgaagtttcatccttcttcatttcagagtctgctrgaagacccttcatttaccactctctccttcctggaggtgtggaaatactctacctgggtgaggctctcgtggctttttgtgccaagtgtccgtaaacttcaacttaattgttttaaatcctttgtggtgattatgcggaaggtcaaatctaacaggaagctccatgtccacttgatgtgtacttacttctatttttgcaccttgtgttgtttgttatcctgaattatgccagggctggtttgtgctaagatacttgttatttgacctcataataccagcatgtcccgtttgtataaccctctctgtagcttcttccagcatgtgatcatacatctacctaacctctcccattggttgaatttaatatactagtgaattttccattgcaaagatgaggttacraatcatagtgttcatactcagaaggactttataaatattttgcctttttgaagtatatacaagaaatgaaaaaaaaaacaggaataaataaaaagaataaaaagagccaggactagaacctacaattcctgactcttgatcaaattgcttttctttttaactctagttaaatattttccattctttttaactcaagaagcctttgtttttgttgtcatcgttttatgattaacttatatctggtcctttagacatttagattttttctgttttatctctctctctctatatgtatatctrtatatatatttatctatatctrtatagatatatatatatatatataaaataatgaatgaaatggactgtttgcaacctcagatgtatttctaggacttagagtgattagcttgaggcgatggtagtttctgtttttggagtctctgtaggtctcagactcacagtctgtacttcttgttttgggggctaattaagtggacagtttcagtgttggtagctcatttaagccataaacatgcagaccatgtggaatcccattagtcaaaccttagcagagtgccttgatgagtacctccttttctttctgaattctattagttgatgctttgttctttctccccaagagccatatctcagctatttcttttcatttcttgtgtatagttcaacatctttctttctttttttttctaaacaggatctcactctgtcacccaggctggagtgcagtggcatgaccatggctcactgcagcctcgacctctggggctcaagcgatccttctgcaacagcctccctagtagctgggactayaggtgcatgccaccacacccagctaatttttatattttttgtrgagatggggttttaccatgttgcctaggctggtctcgatctcctgggctctagcaatcctcccacctcggcctcccaaagtgttgggattacaggcgtgagctaccrtgcccggccttacgtttcagcatctttcaatccatctaatacgcagtgccagggaaggtttgtgaaaacatttgaatcacagagtcacaaacagtgagaatakctgcagttatgtttgtgatgctctaatgaacttacaaaaggccaggcctagtatttcagctgtgtccatgatgtctctgatggaaatggacaggtaacatgatgtacacaagcatttgactgttgcatcctttgattgggccatgttcatgcagccagcctgggaaagcaattagtagttttaagcatgggaaatcatataaaagtaaactaaaattgcatttgaattaattgatgaacatgtttgcttgaccatatcctgctgttaggcgtcttcaagttaacttaagtggttgataaaactttccaaaaagaatactatcaactgctgagcacctgttgtcagagttgtgggtaattcgcaaaggttttcaaatggaaaagttgttttctcctgctaggaagcatggtctcagatccacttctaaggtcagtgtgaaagggaaggcaaattcactttgagcaggggaggcatgatctggaagataaagcagctaggagtatagactagggggctgatggaggggaacacctatcacaatatgtgttctcacaccaatgatatatattttccacacatttagattctccatgccactccttatctctttagtgcagaaaacggagaggaggttcagtattcttaagaaactcccatgattgctttgaggcaatggatttaacrggtatctttatcccttatttacgcactgactgtggtactgagtcatccctggtgtttctggattttattggcaatgccaagagagcaggaagactgggacgtgaactgacaacatttatgattctggcagcttgacatcacccaactgttctctttgtttggttttgcttcagacttagtttagttttgttttttaagggctggggtggaggagagggatttgctcttgcagttttcctttcaaaccaaactctttcaaagccttttgcaaactcttttatggattttactcactggttgagcaagagttacttatgagatgtggcttcggcattttcacagtgtccataaaaaaatgtatattactatgcattgcacatttgccacttagaatttctgaatgcaaattaatcaacttgcagctgtgactaacaataaaacacaggataatgtacctacagaaatgagggcattggaaatccgctctcaggtggccatcgaaaatagtcagcctgagtgttgctacctgttttccataattgtgtagctttgcctttccttarttaatctgttcaataaactcctctgcagaatccaaatgcttaaattcagtttctttttgtctttatggtgtttwtcattgttaacgtggcatcggagtagctcgacttttgcatcatgataaattcataacccaagagaaggcagaaaacataattrttrtcaattgcctctctcctggaattgccattggctgagtggaacaaaatacgaacttaaggagtagctgattcagagaaatccagggtaggaacgggtcccatcttgatttcaatgtcttttttgaggaggccttcccattgcacttctcttcaagtttgcccagatagtaagttctactagacatgtcaattttttctgaggtctaatcttgattttttttttcctgcacaatatggaattcagtgtttttatttaatcattcagtaagtcttgactgcctgctatggaggttaagccctttactaagttccaaggatgtacctgtgaataaggcaagttcctttttatcattgtctttgcagtctattaggggctacacaatttaaacagagaatatatataaaatggtagaaagtacaagtaagtataccttatttttttaaaaaaaatgaatgtggtatttcacccacagcctcaagaatcactttccttaaaattgccagagtaggaaaacttacaattgaagaatttcaggtatttatgggaaaaatagtattagggcaattgcggtcaaacacattcgtctgttcgttcaattacagcagtaaggatggaagtctaaagagagtttctacgtgatcttatttatcctgcatttataaatacacaaattcttgtacaattaactcagtttttcactcctttcttgcttgcaacttgtcaggtcgttccctccccastagttgtgaacttctttatgctagcttcttccatcaggggctcacaaccagggactgtagaggtttgcagaggtaaatcttggtagataaggattttatgaaaagggagctcactgttggtgaaaaatccttgtttctacagattttgggtcaagataagaaaaattaacttttaaaatctgaggaatttggagattatctccaggggctgaatatatttttatgggagaaataaaatggatagttttaaacttgaatttagtttttcctaatggaggcccttttgaagatcaaatgggatctgtaaaaactctttgaaaaatgtagactgcttcttatgtgattcttactggtctattatttatcaagaaattaaamaggaatgaatatctgtagctgtttttctttttctttcttttcttttcttttctttttttttaagatggagtctcgctctgtcaccgggctggagtgcagtggtgctatttcggctaactgcaatctctgcctccygggttcaagcaattctcctgcctcagcctcccaagttgctgrgactacaggcgtgcgccaccatgcccagctaatttgtaattgtttgtttctaaaaggatattcagtgcttccactgtcttttagaagtctgtagaaggaaggccaagaaagaaatacccattattttggctgaagatgatcactttagctgaaaccagttcaggttcaaactcagacattggtgctattttcatatatctgaaatgttctgaaaagattactgacgatcaacatgctgaactgacatttcacagatatgcagatttattcatctctgttcaaggtatgccttttccaatcataatagccaygtagaggacattaaacaaatattttattgtggtaaaaacacttaacatgagacctacccttttaacaaatttttaaatatataatttattattattgttgactataggtaaaacaggacatttttaacgtgctgtggtggcctattggactttcagcctccctgggtgtatttcgctgtatatgtgtaccatgtcagcttaccctagaatttgaaacattttcctttgatgattaaattttttttttttttttttgagatggattcttgctcttttgcccaggctggagtgcactatcgcgatctcggctcattgcaagctccgcctcccgggttcatgccattcttctgcctcagcctcccgagtagctgggactacaggcgcctgccactacacctgkctaatttttttgtagttttagtagrgatggggtttcaccgtgttagccaggatggtctagatctcctgacctggtgatccgcctgtcttggcctcccaaagtgctaggattacaggcgtgagccaccgtgcctggcctgatgattcagtttttaccccaagatgcagtatgcctcmgtctcactaaaatatgccaatatgttcttcttcttgaggatcagggctgatttcttctactgggaaaatgtatcccctgtgtttggccccagaggcatcagggtaacctgctctcttccattctcaaagcagaaacagtgttcctaacattctaagcctgggaataggatggcaggtcgtgggaccagcattttaattacctaaagggaacttattgattttagtccagaacacggtggggaggagttcatattcwttttttttttgagtctggattttagaataaattcactgtgtacatagctattccatctttaaaaacctttgtgaatgytaatatacagcctttataaatttgaggtataatgttcaaaatgctctaatccctaaattttccagtctaggttattatacttttatgactattaattttgatgtaggccttttaaaatcaattcctccctgtaattacaatgctgctttatggtatttgtgatatatcatgtgaatatacttgagggtcatgagaagttcatatgtgtgtgtgtagtgtgggccccagactttcgccacactgctggctaaagtggccatgtttttgtacgtctctgcagagcttacaagttattcaacagccagatttctattctgatatgcccttttagttttcaaagcatcgaaaaagggtaatctttagaaccgaagtatttgcaaaactcctagacttgaataaggtatttttgaatttgaagagctaagaacccatcaaatcaaaatgctaataattcttccaagtcaaaaggtaactctcattttattatgcattgaccaccattcactttctgttggactgcttttggaaaaagaaccacaagtctctatttttaaaatagaggtacaatgataaaacaaaacaaaacaaaacaaaaaaacaacaaaaaaaaaacccacacaggtctcatcagccaagggatttaaaaatcaaatttaacttcaaaaaactgaagttgatatagcaggatcttggagatgcagtttcttcacttttcttttttttctaactgagggattaaggatataaacccaacttcaaatttctttctgggtggtcttgaaaacttaacagtaggtcctgtaaagaggtgggggaraggaaaaagaaatcctttactctcatctgctggttttaaaatgagaaaaatacacacacacacgtaatgatgttcgtgatgttaatggagggaaatatcataaataattaagaatttaaaattattataaaatatttagtattattgttgttactgttattagtaggaaggggccttgccatgcttcctttcttcaaacagctcagtactttaaaatcgagtgtggctgtgtttgtcagtcgtggtttgtgttctttgatttgttctgcatgttcttcttttggagaggatgtgtcactttgccaatcttggtccttgctgttgtctggtggagggaaacaagcctgccaggccggctcatctgacccctggtggcagggagtggaggtgcactcaggatgctcttggggaatcataaaggaggttaaagaaagggacagcagaaccctgacaatccttgcccctaagcatggaaaagcctccggaccgggtctggagtgcaacagaggcccctgaccttgtctctagctctctgtctgcatcttcagcgtggcttcactggtttctaagtctctggtgtcttttttcttttgcagccggcttgcaattgcctccttctaactctcaaaaggatgcatgggatgggttcagtgtagtcactgttgtgccttttggacaaggctttccagccaggccaccctgtttacaaggctgtcctcacgtcatgggcgctcatattgtccagactagatggtcaaggtgattgggggaaggaagtcacagagccaccaattactaaggaactgcccagagatcctgcctcactgggaacctgtgagtgggctggtttcccccagcagaggggctgtagcatagcaggtacccacaggagcctgggcatggcctttttctctaaagggctggatagtcaatatttttagctttgtgggctttatggtctctgttgcaacttctcaactctcctgttacagcaggaaagcagccacagataatatataaatggacggatgtgttccaataaaactttatttataggaacaggcagtgggccagattcagcccgtgggccataggttgccagcctctgactctggtgttcagatcacagactttggatgtctcatatctgaatctttctaatctcgtgatagggcaaggtaattaaaatgttaatacgttagttttctcactgtcaatgtgttctatgacatcatttatgcaaagcatacaaagctgagaataaagtctcagcaaatgctagtttcctggcctccttatacatacttacaaaggatggtgggagatagtttgagatttgaggcctctgaagaataggtgtttttgtgatgattttggcttttcagtttgacagttggctttgcttttttgacagacacmttaagagcttcaagggtcatttcatggtttgtcctttccatgtcagggacacctttcacgtggccattttaagcacaggaattgccttcaagtagtttactcgtacgaacttgtctgtaatcatctttccccatttggatggtgggttgcccattttaattcaaggtttgtctaatgtgttagtgcatattcttggctcaagcaggataagacactagtaaccatgaacctgtatatcaaaaagcgtgactagagtttcatagttaaacatgtgctgaaatccacagtggacaccagagagggtcatggaatctgrgaatggatgacttgtcccatgatgataatatctgtgttcctacggctgggcccggtggctcacacctgtaatcccagcactttgggaggccgagatgggaggatcacgaggtcaggagttgaagaccaccttgatcaatatggtgaaacsctatctctactaaaaatacaaaarttagccggtgtggtggtgcatgcctgtaatcccagctactcaggaggctgaggcaggagaatcacttgaacccaggaggcggaggttgcagtgagccgagatcacgccattgcactccagcctgggtgacagagtgagactccgtctcaaaaaaaaaaaaaaaaaaaaaaatctgtgttcttgcctggcttattgagctccatggtaaatgttcagaggctgcaggaatgattcaaagtctgactgatttatgtgcattgggcattttgttgatrtcattcagattaatgatggcactgaaaatgtgtaayggaaatgagaagtttgtatcctgcctgctataccatgattccaatttaagagggggtaaaaatattgcactttttaatctattgttttttgaaagagactgtttaaaacacgtaattttgctaagttatggctcatatcgtatttgttattttggttttgaaaaattgagtaggaagcaattgcrttcttaaatgacttgaacatcaaaggcaagtagtgtcttgttttaggagcagccaggctcctatccctctgatccagccaagtgctttcacttggtcccactctggggaatcaccagtggttctcactctgggagaggcccctggttgacctggaatgacctagaccagcagtcacaagctcctgcccatggacaaaatacagccggtacctctttggctatggcctgcaggctcagaayagttyttacattttcaatcatctgcaaaaaagaataaagaggagaatattatttcttgaaggaggaaaatgatatggaattctgatttcagtgtcataaagttttgaatttcatcaataaaaaatttgcagaaatttgtttttctctcctgttatgtaaatacctctgtaatagcctcggttttgcctcttggctcacaaagcctaagttgtttactatttagccctttacaaaaaaagtttgccagcatctgatgtccaacaacaattttcagtcttttttgtagctcccaaattctctcattaaaccagatcccttgagggaagcctggtttacaaaatagattaagtgatgtggctgtttggagcaggaggctgtggtctgagtcttgctggcctcaaccctcaactcacttccacaccttacctcctggggataaggctgccttcgtctagaaagtgcctcggttccagcttggaaatatccatgtacagtcccttttttgttattccaaaacccaaagagatctgaaaagcaaaaacaaatttattgtatatttatagcaaatttatttggtggtgaaatttgacttcagctttagcgtccctgtttctcstttctagtgtgaatgttcattttgttttgtttgtttttttgaggcaaggtctcacttcatcacccaggctggagtgcagtagtgtgttcacagctcagagaagcctcgacctcccgggctcaggcgatcttcctgctgtagcctcccaagtagctgggactccaggcatgtgccaccatacccagccaatttttgtgtctttgtagagatgcggtttctctaccatgttggccaggctgaataatcatattttcactgaagaaatagaaatgtcattgttataggatgttgccccaaaccccgcaaaggtattttgtaatatgcagtatatgtgctaaattactttttttgttgttgttgagatggagtttcgctcttgttgcccaggctggagtgcagtggtgtgatcttggctygccgtgatctctacctcccaggttcaagcgattctcctgccgcagcctcccgagtagctgggattacagacatgtgccaccacacccggctaattttgtatttttagtagagatggggcttctccattttggtcaggctggtctcgaactccggacctcaggtgatctgcccaccttggcctcccaaagtgctgggattacagtacctggcccaaaatacctttctaacatggaggaattaggaatactgaaggcatcggcccccaagggtttgatgtgctcttgtccccaaggcctgcagatttgcatcacctctccacttcgtggactcctcgtacctgcctgattccaggatgctctaacctggccacgcatcccccgtggattctcagctgttgtgtgtttcctcctcaggtggccactgtgtctggtgctcacctacattttggttcatcctgactttgcctcagcctccccattctgcatttctcccacggcttctcccagccctggcccagtgacactgtaatgtggactgtggcatcccctgagtctaagctgttgaccagctcttgatggacagatgctggcagagatggggaaggtgctgttcccttcctcctgggaagggcaaagaaagcagggtggtcctcccatccccgtgaggaaggaagagcctcattcatgctgagaccctgatggagaactgggtccagggataatgttttgtgttcctgctcatgggactggtgtgttattgtcaagggatcttacaggccttgcttcccaggcccctctatcccctctgttcttgcttaggcattagtgatttggttcttctagctttttttctttttttgagacagggtctcgctttgtcatacaggctggagtgcagcagcgcgatcttggctcactgcaacctccgcctcctgggttcaagcaattctcctgtctcagtctcctgagtaggtgggtctacagtcacatgccaccacgtctggctagtttttgtattttttagtagagatagggtttcacttgttggccaggctggtctcgaactcctgacctcaggtgatccgccagtctcaacctcccaaaatgccgggattatagatgtgagccaccacaccaggctggctcttctagtttttgaagctcacttttcttttttcctcaagactcacagggaatgggaccaggcacctgtctttatacattctcaaagtccatggtgacgatgccatgctccggttctaagccagttggacagacacaggcaagggaagctgtcagtgtgggtgagttgcagtgtaagggtagtgggtggaatagcgtctccccaaaatccacacccacacagaatcacagatgtaacgttatatggaaacagggtctttgcagatgtaattagctaagaatctcaaggttaaatcattcaggctttagagtgggccctaaatccaatgacggttatcctcatgagaagaggaaagcagggggcacagtggtgggtgtgcctgcaatcccagctactcgggaggctgcggagggggcatcacttgagcccaggagttcattgccagcctgggcaatatagcaagaccccatctcttaaaaaaaaaataacaccaaaagacaaaacagaaaaaggaggagaggacacagaggagaaggctctgtgaagtcagaggcagagattggagtgatgcgtctacaagccaagagatgccacggtcatgggcagcccccagaaacgaggagagaaacctggcacggtttccacaaggagtcacccctgccaacaccttggtttcagacttctggtctcctgaactgtgagagtcagtttctgttgagcttgtgctgatacgctagggcagccctagcacactgccacatctggtttcccggaggaacttcacagggtctttgttctttatctacagtctctggaagtctcagcagcctcctgtgttcgcaactgtcattccagagcagccgtctcgtgttatgcatttgcttactcataagcaaatatttcacaagaacctgcgagggccaggctgggccaggcaggtattgcaggtgcaaggatctatataagacagtgccctttagaagatccctgtctcattgagaagcgttgagtaaatgggtctctctggtcattctctccagaacatgaagccaaagggcygagagggagagactccaagaatgaattagtgtccagcaaggtatcgcttgtctcaggatgacaacttgcaatttggggatctctcaacgtcctgacctccatctcagtgggcatgttcctcacctggctggctgcccctgcttactgatgcagcctcctgtcacacggtactcacctctattcactgtattccaccaacactggccttgggagccagcagtacccccattgtacagatgaaagtcttgtgactgtcaacattaaaatgagaatgatattgacccatgatacttacccacctgttcagtggattcggtgtgccgtcagcatggttcccagcacatagtaagtgctccgtaaatgtcagcatctattattatcatttgtgtttttttttccccttctctgccttcctttctctccctccttggtctgcttcctcctgttgctatcagagcctgcctgcctcatccttgttccagccttgatggtgatgatgattrtggttgctgttgctatttgtttttttggtttgtttgtttgttttgagagggagttttactcttgtcacccaggctggagtgcagtggcgccatctcggctcactgcagactcttcctcttgaagctggggaagttcaagcaattctcctgccttaggctcctgagtggctgggactacaggcatgtgctaccatgcctggctaattctttgtagttttagtagagatggggtttcagcatgttgtccaggctggtcttgaactcctcagctcaaatgatctgcccacctcrgcttcccaaagtgttgggattacaggcgtgaaccaccacgcccctcacgcgcagccactgttgctattgatgattattatgacatcattgctcagattcacttggctcagagagggcggagtcagagtgacccaggtggtcactgctccccttcttgtccatcaaatcagctgcctccaacagcattgcctggcagcgtcacgtagtagccctctccctcacaaggcttttgaggcagacaaatgccactgataaagcaaaagcaaatgttttgggtgaattccccatagctacactagatttgaggctgagaaatggaatgcctgtcattgttgactgaaaaatacagctctcctaatagagtcttggtgcaggagctgttagccttgccgccctgcagacttgaagaattgcgacgtcggcctaacataattttggtaactttgtctgcttctgcctcgggtagaaataattcagatttcactctccattttctttaatgggctaaacagccactttgtaatacctgtattttattagacataattctggatattgtttctgcagcgtttttgaaaagacaaacctgagagagcccagctatttaacttaagcaattttaaagttatttgtaaaatgatatgctgtcttttttgacccagttactttataaagctacattctttggcaaacattaacacaacttctccgtgtgtgggctaaataaatattcgggcaacactgattgagcactgccttgggtaaataattctctctccacacatttcctagttyataatgaggagttttcttcgtggtctgaccaaatgtaacattccattgaaaatgagacataaatccttgagtgagggagacgtggaaccagggtttgaggagggttattaaaaaggtgagggtagcagggtgacctcctgagtcccctgctctcccgagccttctctcctctctggaacccatggctaataggggacaggagagagcggaagcagaaagaataagagatatgaaagccagccgggcacagtggctcacgcctgtaatcctagcactttgggaggccgaggcaggcagatcacttgaggtcaggagttcgagaccagcctrgccaacatggtgaaaccctatctctactaaaaataacaaaattagctgggtatggtggtgtgcgcctgtaattccagctacttgggaggctgaggcatgagaattgcttgaacctgggaggtggaggttgcagtgaactgagatcgcaccactgcactccagcttgggcaacagagggagactgtctcaaaaaaaaccaaaaacaaaaaaagagacatgtgagccttcccttccctctccccatcctagcctcctctcacccaggtccattcttccactgtcatcccatgatgctctcttgcattttaaagtttggaagcccttattcctttgttttgtttttgaaatacaaatatcaacatttttattgttctatagtaatacacgtttcttctatagtacattaaatcacaagaggtaatagtgtatctactaacacctatacttttgagtagtgttgagtgtaaatgatattttgaaatatctgcagtaactgatgtgatatgcaaacatctgtgatttcttttaatttttattaattttcattttttaaaaaactttagtttctggggtactcgtgcagggctgttaaataggtaaatgacatgtcatgggggtttggtatacagattcttttgtcacccaggtcagaagcatggtacccaataggtgctttttcggtcctctccctccttccaccctctaccctccagtaggccccagtgtctattgtttccttctttttttgagacagagtctcactctgtcttccaggctggaatgcagtggcaccatcttggctcactgcaacctccacctcctgggttcaagcgattcttgtgcctcagcctccggagtagctgggactacaggtgtgcaccaccatgcccggctaagttttgtattttgcgtagaggcagtgtttctccatgttggccaggctggtcacgaactcctgacctcgagtgatctgcctgcctcggcctcccaaggtgctgagatcacaggcgtgagccaccgcacctggcctattgttcccttctttatgtgcatgtgtactcaatgctcagtttccacttacaaatgagaacatgtggtagttggttttctcttcccgcattaattcatttaagataatgaagctcctgtccttgacccaatctccactctaccgtttgatgtccagtgtggactgcccctctgaaagcccttcactgcggctcagcctgtggtggaaggtgtccaaggtggctggaacacctcctgctgggggtgtcagtcttggctctcctgtkttctgcctgtgcaatggtgggtaggtcccttgatacctcgtaacctcagcatccctgtgggtgataaggagatgataatagtctcttcccgatgggggttaaataaaataattctcggagtatgtgaagcagtacatgtgaagtgctcagctttgtgtctggcacataaggaagtggtcagtgtttaatgttagggatcatagatgctgataaattgccgtttatggcatatttcatgtattgcctcatttaaacctccttgcaatctgttatgactcctgctgatgatggggaatttgagactgtgagaggcttggcaaaagatctaagctgtgaagtatctggaataggattccaccttcagccctgccttaatgaagaccatggtcttgccacattgcatctccccaagatttttatggttctatttttagtcacgttggcctgcgttggtaaatttacctttcctggtccttttgagtaactatctctggaaaggattaagtgcagtgatcaatcagcagcaaagtcctggaagaaacccatttgttagtctctgggcctccccaggccttatcagggcttagccttcgagcagtagcaacacttgcacctgcagttactaattcctgtggaatgaagtaggcgggcccgaaatgtacagcccttatccagtgaattctcataggagcaaaaaaaagtgttttctttcccccttggagttctgtttcttcttaaaattagctatttctcatacacaatagggacatattcataaaaaagggaaaatactccaaagttgaaaaaaagattgaaaaagaaaatcctccaatatatatctactcttagcattttggcacatattcttacagtagtttcaaatgcccaggccattttgttttattttgttttgttacaattgtggcatatgtactcgtgatggatttgcttgttatctctaaattaattctcctcctgcaattcaaatattccagagatatgtatatttttaacacattgttaattatcccatatggataatagtttcttttctctcttaacattttaaaagcatgcctccaggttgttctagacggtcctgaacagtgctttgaatggggacatgttagtaaaccaatgagaggaaccacggtttagttcatcattctccttctaactgtatttttaggttgtcactaactcttttcagtcgtcatttccatggccacgaacatctttggttctaaagcatttttcccatttaaaattatttctatgggattgatttgccagaagtagaatttctaggtcaaaggtacaaacgcttgagaagtcctgatacatattaacttgggccagaaatctaccatgtaattgagagcaccttgagcttggcttcagagccaggatgaggacaggaataagtgggccttttgatttgaaatgttgagatacgaatgtattctagatgggccaaataaccagcttattttattttaaagtcgagtgaattttctgcctcactaatgtgcatgtcttcaaagacaagtagtgggaacggagtggggatttgtcatcccatagaatgccaccacatggaatcggtcctgaggcttctgaaagcagttccaaatttgaatgtttcctaagttagttcttgcggtacagcgcagacaatattcttcctcgacaatagctgagacccaagtgcctgggcgcttccaggtcataattaacctcttcaaaataagagcaaagaaaggcaggaaaaggtcctctccattccagaaaggagaacaaagagggggaattctaaccctcttgccacctctgttctcgtccgttccatattaagaagcattcaaagactaggatgccattttgcaaacgtctcattctccctgaatggtaaggctccacgctttagcacaagtggtacaaatctgccttccctcattcttttttgcagatcatcccgctccccacccctttctttatcatggctcatttggagcatctgtgcattttttaaaggctggattttctttctgttgccattgaaacattgcatttgtacaggagaactacttaatggcacagtttgttattacatggaattaaatacaacctatttaaatcatgtaccgtgaaaccaaagagctgtgtatggaaaaagcctcatataacccagtttgccaggtcctaactcccttcatacatatactaacatgcaaaagacctcctaccttttttttccccttctgtttctctcttggtataacactaccctgtttttgaaagtacttgtactgctaatatattctttaaagaagaggggggaaacctgttggtcccctcataaaacagttaacaggaagcccaaggcatctttcagtgccatttttggctgatgtttggaatggttccatcaatcaccgctgttcatgtatagctggtttttatgtcagttaaaccatcttccatcaagttggtgaagcagagtcagggaacaagatgaatagcaaaacgtcttctgtggcatggaaaaggctttgcttttaaatgcccgtgttgatttcttaatattttcaacttcctcttctgaagccagttccccccgaccatcagtcatgagtccgttcttttaacctygttcaggtggcgtggggcggtgtgtttggtggggagtgmtgggtgcttgcctggaagtgcgagcaattgatcagctgatgaggggtatttattatctgtccctgactcccgagagaggaaataaatccttggaccccagagtgattttcggagccacaagaatgcaagatgtcctgtttccagtcagaccatagcagtatcagtctgtgcagttggaatcttgcatggggaggtgtttttatttcacacaagaaagaatggcacatctttccttgaaagatgtattttgtatatcttaatgtcagttatgtttacgtgtttgctgctcagaaatcaacaggatttctgcccttccccagccccctttttttcagcccttcagagaatatttgttgagtgcagtgtgtaaaatcatggcggtgccaagagggggtgtgatgggtgtggccgcccccctgccagcaggaggaatctgttttcactgacattgtttggaatcaccaagcatggtgatgataaaaagcagttaaactttggtcacttttattaatacttttaagtccttagcgaacaatgcacccgttattacttgcacctagtggacatggttctcattgctgctgcccacctttcttttttttgccatgggtgcaaaagatgcctctggggatcccagaggactcagcattggtaaggatgcagtcctaatcctgaaggagggtacagctgaccagggaggtaacacatgaatgcagctgatagggccagttggacccagatttcaactgcaatctctatttccttcggatctgttgcatctgctcaaacactagttctgcaatttcccaacacctgccccctgccccttataaaagctcatggttccatgtgactttccactcctgcgtctctggccttggggcaggtcagtccgtggatcacctcactgtcctagggatgctcttctggtccacactgtgcctaccttggatatggagttccacttgttcccttacctttcacccacctgtgctcctcacccaagcaggcattgatggaggtctcatactttactgaagatgtgaggaaagaggacacttatgtagaacccaactgcaggtggagccttggcgatccatagccctctgtaaagtggggattgaagcacatatcttgcaaggcttgggcattgattgcagggagtaatgtgtatatgaatcatcagctatgcaacataatgctgatgctaagtactaacattgatggagtgttggcatgagctgggcagagtgctccatcctctatgtgtgtattagttcattcttgcactgctataaagaaatacctgagactgggtaatttatttaaaagacacctttaattggctcacagttccacaggctgtacaggaagcatgatgctagcatcctgcttggcttctggggaggcctcaggaaacttacaatcatggtggaaggcaaaggggaaggaaagcatctcacatggtgcaaacaggagcaagagagggagcaagggggcaggtgcaaaacacttttcaacaaccagatctcaggagagccaactcaccacacagcatacgtgctaaaccatgcatgagaaatctgtccgcatgatctaatcaccttccaccaggccccacctccaacgttagggattacatttggacatgaaggctgggtgcggtggcacactctgtaatcccagcactttgggaggccgaggcaggtggattgcttgagctcagtcgtttgagaccatcctgcacaatacggtgaaacctcatctctactaaaatacaaaaatgtagccaggcgtggcggcacatacctgtagtcacagctactcaggaggctgaggcaggagaattgcttgaacccgggaggtggaggttgcagtgaggtgagatcgcaccactgtactccagcctgtgtaacagagcgagaccccatttcaaaaaataaataaataaatttgacacgaaatttggtggggacacagattcaaaccatatcaatgtgaattaaatgacatcattcagtcctcaggacaaccctctgaggaagtacttatgccccccggcctttttttttttttttttttttgaggcagagtcttgctccatcaccaggctggcacgatcttggctcactgcaagcttcacctcctgggctcaggtgattctcctgcctcagcctccggagcagctgggactacaggcacgtgccaccatgcccagctaatttttttgtacttttagtagagatggagtttcaccaggccagactggtcttgatctcctgaccttgtgatcctcccacctcgacctcccaaagtgctgagattacaggcgtgagccaccgtgtctggcgtcatgccccgttttatagatgacaaggcatggaatggttaaatgtctttcccaagctcatggagtggtggcggtggaggtgttgtgaatgtgaacccaggaagtccgcctccagagctgcaggcattaatgcaaagctgcactgcctcacgaggtcgctgatgcactctcattccttttcctccagggactcctgcactttgccaggcgtggrccagaatgccactcgtattgtttatcttaatgcttagtgatagtagctacctccagtgcacgccgcattagcctctccaatgagtttctcctttattttaaatgtaaatctagagttcccttaatccccttaatttttagtacgtggctctgagggcagaaacattttcaggagcagcctgggctgagtttttaatgtggcagcagcctcggctggtttcagcatgcaggtgagaaggccgttcatctggaacttgggctacccaacagtgcaagtggggagatcagagcatggaaaatgtttttgtataaacttaggtggaccaaaatgatcatttcaacaacatttcggacttgattttttgtatttatatggcccctttcttcccaagaattgaaagcctcaaactagaacgtggcttttgaacggtgaacattccacaaacatttaatacagagatggctgtggggtgggggctgggggctgggggcctggaagrggagaaggggcaccagaaggagaaatgggaggaaagggcgagtgagatagcaaagagaactcagaaagtaataaagccctgcagtartcagagggctgaggccaggtccccagtgagcggctgaacacacagtgattcaaacccactccagacctgtgttcttaatcattaccttcacctggagggacagacctggccttgggcaagccacccccactccctggctctgtgaccttggcagctgactggccctctccaagatcagtttcctcatttgtgtaacagtagtaatctccaatttagggggctgtatggatattaaatgagaaaacacacacagatcatttctttagcacaacgtctatctggcacattagcgagagctccggaaatacccatgccagggtcacaagctcggttctggagctggatggccggggtttgattcttaactctgctcctttctagctgtgtaactttaggcaaataatgtaacctccatctgcctttgttttttcctctgtaatagaaggaacaacaacgaacaacattttttttttkgcaagattaagtgagatcttccatttgacatgcctggctaattggcagtgcccaacagatagaaactattggtattgtaaggactgcttattgggtacatatgctgtgccatgggaggtggaggtgctgtcatgctgaacccctattaacctcaataggaaaggcaccaggttcaagagctgaagaagacactcagagccaacagatagacatggggttttattaggaggttacatataggggagagagtccagtgatggcgggctggatagtacaactgcccaccttacatacagaaatggtccagtggcagtaggctggacaggatatccacctccctacagtccagtggtggcggtgggctgggcaggaaaaccataaccacctgcaaatgtcatgtggtttatatcacaccttcacttaacaccctccccctaacaacctctacctggcaatcttcatttaactccaaactcaggacctcaatcctctgtttggcctgtgttccacgggacaggcatggggcacagatgtctgttatatataagggacaaatctctgggttggtcactcctggattccccagcccggaccacacattcaggtgcatctcccacacaggatcattctaagggtatgcttacgttaccgctattggggtgtgttcaccctgcaggtgcagagatggcaaccgaggcagctgaggatcagggagtggaataacttgcctagttctggctcttcccatctaatgtggctgcactagatgctgttaggaggaggaggaagcctacttttgttttttacccagtttctgttcaaaggtcgtatttcatggtgcctcatcacagtatgttcttatatgccctggcaaacagaaggtgctcaataaatgctagttcatctggtcccttaatgaatactctggcttcgtcatcttccctaggctttggttaatttggtgccctcttttgccatttctgcaacccttattcattgctgtcaactgctcgttacacagcattgcctgtttcactctgtacaggtgccaggcgtctctcagcttctcctctctttcccatccaactgagcagcaccaataaatagataagaaacctgaaggtctacatcaaatcagcttctattgctgcaaaaytcttctagctaacttcattctaaaagctgtctgaaatatatttacttacacccgagaagattcaaaaacattaccgctgaaccccgatgctttgggaacacatggtgtccttggccacttccttgcttgttaccttgtccaacagctgattggcatagtacagatgtagacatcaagtaattctatcgttaaaggattagtcagcctctccctactccccacccacttatctcagtaaggtttagtcaagaagttggaaattaatggggaaggaaggttttgggttatgtgtggatttcatttatccatgctatctcttccctccattagcatggttaattaagagttgtcaatacatctttgttggagtatttgattattttttcaacagggaagattagaatgaagtcttcagatctggcaagtgtcatgggacttgtaaagtaaattgcaggttaagccctcattttgatctctgggatgagagcaagcaccgtttcattgacatgtcatcagctatgatctgagggagcacacagaggtgccctttggggaaagaggggcatcttgcacttgtctcccacattgaaagggtttattgcacagtgagtgtgtgcaagtgaacaaatagcagatgggttagaatggacagaagctagctctgagcacctcctgatttatgctttatttaaaaaaaatcatatgtatgtatatgtgcatacacatacattgttttgtatatatttgtcagatggaggtgtgtgtaaacaaataacagaaatgagttaaaattgacaagttagcttggtaaacatcttgatttataatttattaaaaactacgtgggtatgtatatacatacagacacacacacttcttcaccacctgaacaaaaatcccttttgaatcatccttcttgccttccaaacaagtacactagcaaacacttttcccagatggcaaatgactatgcccgttaggcatttcttttagcatttgtgttgacaatggcctttatttttccttctacttaagggctctcacgttctagaatacatcttaccagcgattaattatgccttgagattgccaggagacgtagacgagcttttattgttttagccactgaatatacctctagataacacaatacatatttacagtgacaagctttgtattatttataggattatagcaaatcatcaaaaaacaacccaaaaagggccacttagaccaacatccttatttctccctcggcttcagcattgaattatgcatgcattacaaatggcaataaggagtaaaggtcggtttagaacaacacagnnnnnnnnnnnnnnnnnnnnnnnnnnnnnnnnnnnnnnnnnnnnnnnnnnnnnnnnnnnnnnnnnnnnnnnnnnnnnnnnnnnnnnnnnnnnnnnnnnnnnnnnnnnnnnnnnnnnnnnnnnnnnnnnnnnnnnnnnnnnnnnnnnnnnnnnnnnnnnnnnnnnnnnnnnnnnnnnnnnnnnnnnnnnnnnnnnnnnnnnnnnnnnnnnnnnnnnnnnnnnnnnnnnnnnnnnnnnnnnnnnnnnnnnnnnnnnnnnnnnnnnnnnnnnnnnnnnnnnnnnnnnnnnnnnnnnnnnnnnnnnnnnnnnnnnnnnnnnnnnnnnnnnnnnnnnnnnnnnnnnnnnnnnnnnnnnnnnnnnnnnnnnnnnnnnnnnnnnnnnnnnnnnnnnnnnnnnnnnnnnnnnnnnnnnnnnnnnnnnnnnnnnnnnnnnnnnnnnnnnnnnnnnnnnnnnnnnnnnnnnnnnnnnnnnnnnnnnnnnnnnnnnnnnnnnnnnnnnnnnnnnnnnnnnnnnnnnnnnnnnnnnnnnnnnnnnnnnnnnnnnnnnnnnnnnnnnnnnnnnnnnnnnnnnnnnnnnnnnnnnnnnnnnnnnnnnnnnnnnnnnnnnnnnnnnnnnnnnnnnnnnnnnnnnnnnnnnnnnnnnnnnnnnnnnnnnnnnnnnnnnnnnnnnnnnnnnnnnnnnnnnnnnnnnnnnnnnnnnnnnnnnnnnnnnnnnnnnnnnnnnnnnnnnnnnnnnnnnnnnnnnnnnnnnnnnnnnnnnnnnnnnnnnnnnnnnnnnnnnnnnnnnnnnnnnnnnnnnnnnnnnnnnnnnnnnnnnnnnnnnnnnnnnnnnnnnnnnnnnnnnnnnnnnnnnnnnnnnnnnnnnnnnnnnnnnnnnnnnnnnnnnnnnnnnnnnnnnnnnnnnnnnnnnnnnnnnnnnnnnnnnnnnnnnnnnnnnnnnnnnnnnnnnnnnnnnnnnnnnnnnnnnnnnnnnnnnnnnnnnnnnnnnnnnnnnnnnnnnnnnnnnnnnnnnnnnnnnnnnnnnnnnnnnnnnnnnnnnnnnnnnnnnnnnnnnnnnnnnnnnnnnnnnnnnnnnnnnnnnnnnnnnnnnnnnnnnnnnnnnnnnnnnnnnnnnnnnnnnnnnnnnnnnnnnnnnnnnnnnnnnnnnnnnnnnnnnnnnnnnnnnnnnnnnnnnnnnnnnnnnnnnnnnnnnnnnnnnnnnnnnnnnnnnnnnnnnnnnnnnnnnnnnnnnnnnnnnnnnnnnnnnnnnnnnnnnnnnnnnnnnnnnnnnnnnnnnnnnnnnnnnnnnnnnnnnnnnnnnnnnnnnnnnnnnnnnnnnnnnnnnnnnnnnnnnnnnnnnnnnnnnnnnnnnnnnnnnnnnnnnnnnnnnnnnnnnnnnnnnnnnnnnnnnnnnnnnnnnnnnnnnnnnnnnnnnnnnnnnnnnnnnnnnnnnnnnnnnnnnnnnnnnnnnnnnnnnnnnnnnnnnnnnnnnnnnnnnnnnnnnnnnnnnnnnnnnnnnnnnnnnnnnnnnnnnnnnnnnnnnnnnnnnnnnnnnnnnnnnnnnnnnnnnnnnnnnnnnnnnnnnnnnnnnnnnnnnnnnnnnnnnnnnnnnnnnnnnnnnnnnnnnnnnnnnnnnnnnnnnnnnnnnnnnnnnnnnnnnnnnnnnnnnnnnnnnnnnnnnnnnnnnnnnnnnnnnnnnnnnnnnctcaagtgatcctccccacctcagcctcccaagtagctgggaccacagcctcctgagcacccgggtgcatgccactgccaccatgcctggctaatttttatattttttggtagagatggggtttcactctgttgcccaggctggtctcgaactcgcaagttcaagcgatctgcctgcctcatcttcccaaagtgctcggattacaggtgtgaaccaccacatctggccaacttccctttctaagagccctcttggggctctgatatgcacctctcatacctcagccccagtcagggttgttgaaaacccactgtctgcccagaggctgggagcacatcttggtctgcctggtatggagggctgggaggaggattgcaggaactgcttaagaggcctcactttgcaagagcagttcaggatgtgtttccagcacagtttccaacatgtgccacccatggcttcccctttcatgttcctggcctttatgctaagttctcacattgttatttttacaagtcttttccaaggcctctgattttctagaccatttaatgtttgccataacccataagggtataactgtcttggcacattcagatcccccgtccccctgctgtccttctagtcagtttctggcacactatgtttatgagcttacagaacagctcctaggttttcttacttccaaaacagtgggcaagaacagctaccttttagaagcaggaaaaaggaacataatgaataaacctaaaggatttaaaaacktggaagacactaagaaactatattgccgagaaagagaaatgtaaattccgctggataaattagcgtttgcggttacttctctctttgttgcttaagcagaggagaaacagaagtcatagcaaagagagaggtagctgcaaaagctaatttatccaaaagaatttacatttttctctcttggcactatagggggcatgtttactctcctgatgtcttttggggaaggcgaggcacaaaagaagggcatcttcttccttcacacacacaccccacttaggaaaatacgtacacttgagatgccagagacacacccaagtagaacacatcccaagaacagtcaataataataatacccatcatttattgaacatccacaatagccagacatttttctagttcttataaatccatgtactcctcccagtagctttatgaggtcttattattctcattttattgatgaagaacttaaagttcaaagaaaggagtaaatcacgaccaggcacagtggctcgcgcctgtaatctcataatctcagcactttgagaggctgaggtaggtggatcacaaggtaaggggtttgagaccagcctggccaacatggtgaaaccccatctctattaaaaatacataaattagtcgggcatggtggcatgtgcctgtagtcccagctgctcaggaggctgaggcaggagaatcactcgaaccygggaggcagaggttgcagtgagcctagactgcaccattgtactccatcctgggcgacagagcaagactccatctcaaaaaaaaaaaaaaaaaaaaaaaagtaactcattcaaggctacacatttactccatgaagtgagcacacttcagacttccagtcttgtgtggcctgtctaccacaccatgagacttcatgtctctcctaaatgaggagaaccaaagctggaaattgtcacyccctgtcagcccacagcactggtttctaaacctactggcctctaccgcttcacttctcactgtaatctctctgaccctaccttccagcttctcttgagaacttgactcttaaattcattggtgagaaaggaaatttttgctccaataaactgggtagctcagtccaggagagaaatgtactggactcagacttggaggacagagctttgtgaccctcctaggcaatgtaatgaccctctcctggcctcaattaactgaggccaggagagggtcattagcaaactgtcctttgctaaatgggactaatgggaagaatagtgtctgccaaataaggtggttgaaggattggatgagactgacatttcatttgcatttagtgaatacttgttgaatgactgaatgaatggttgatgtacagaaacatgaacagagagtagagcagaacattggtgaatggtagtagattgcctcagacgcccccctttagaatcacacaagctgtcatctgtgattgcatacctgtagaagtctctatcatttcgtagtctatgtaaatgttgaccaactgagttgttcagtgtacagactgaacaaccatacagggaatccctaatctcctgcactgtgagtcaaagagtcagacaggtctagatgcatttgcttcaggtgaggccaaggcagtctactcttaatggcacattaggctttggacttgaggccgtgtcttttacatttcgcagcaatcagaaggaatggggtcgccccatgaacttcttaaccacatacaggctcgtggcgtggggtcttcatctggctactagattgtttaaagaaggatttttgtgattcttctaggctgacacattgcctgtcatctgttgtttttctaatcttctagtaaacatttggaaagtgaaggtttaggcatgtatgtttctcttatgtaggaaggggaaataaggccwtgagattgcatgagttttctttccaagtttgtgcagatctgcacaatgattgaaatatttgcaacctgtagagcagcagggtatttatttggcagcaaacagtattgatggattcggggaatgccatttgacagttacaggctcccgtgaggcggtgcaggctcctccgagccagggatggagctggggattgagtgacacaagactctttgggtatstctcaaacaatataaatcaccagcaaaatctcactcctacaaggagaacctgcagggagctccgtgggaggcactgctgtttactctcctcattccccactgcaaccacgcaattaaaaccaaggaatggaatctgatgtctaccgcagcggttttttccatctccattccttctgcattgggaggcttaaaaaaaagaaaaattagatcccagattctttattcttttggaaggatttgaaacgattatcactcatgctctgctgctttgaatggaaaagtgatttgataactttcaaaactcttagccttctaagacttagattctggtactatctcatttatgtgacgtgggacaaatagccactctcttgcataggattttcttttctttctagaaacaggaactgagtatgtttccaatatttttttatttctcctaaaaaacatcagagactatatatataaaatctcacaaactttgtttcccagaaaaacaactatatttaaatgcagctcatactgtatgtaagtatgatgtaggaaaatctgttaattgtgtgacaattatgacttgctgagctgctcatttattaaaatattctccctataattaaaaatattttatttccggagacatggctccattaattgcacatttcctannnnnnnnnnnnnnnnnnnnnnnnnnnnnnnnnnnnnnnnnnnnnnnnnnnnnnnnnnnnnnnnnnnnnnnnnnnnnnnnnnnnnnnnnnnnnnnnnnnnnnnnnnnnnnnnnnnnnnnnnnnnnnnnnnnnnnnnnnnnnnnnnnnnnnnnnnnnnnnnnnnnnnnnnnnnnnnnnnnnnnnnnnnnnnnnnnnnnnnnnnnnnnnnnnnnnnnnnnnnnnnnnnnnnnnnnnnnnnnnnnnnnnnnnnnnnnnnnnnnnnnnnnnnnnnnnnnnnnnnnnnnnnnnnnnnnnnnnnnnnnnnnnnnnnnnnnnnnnnnnnnnnnnnnnnnnnnnnnnnnnnnnnnnnnnnnnnnnnnnnnnnnnnnnnnnnnnnnnnnnnnnnnnnnnnnnnnnnnnnnnnnnnnnnnnnnnnnnnnnnnnnnnnnnnnnnnnnnnnnnnnnnnnnnnnnnnnnnnnnnnnnnnnnnnnnnnnnnnnnnnnnnnnnnnnnnnnnnnnnnnnnnnnnnnnnnnnnnnnnnnnnnnnnnnnnnnnnnnnnnnnnnnnnnnnnnnnnnnnnnnnnnnnnnnnnnnnnnnnnnnnnnnnnnnnnnnnnnnnnnnnnnnnnnnnnnnnnnnnnnnnnnnnnnnnnnnnnnnnnnnnnnnnnnnnnnnnnnnnnnnnnnnnnnnnnnnnnnnnnnnnnnnnnnnnnnnnnnnnnnnnnnnnnnnnnnnnnnnnnnnnnnnnnnnnnnnnnnnnnnnnnnnnnnnnnnnnnnnnnnnnnnnnnnnnnnnnnnnnnnnnnnnnnnnnnnnnnnnnnnnnnnnnnnnnnnnnnnnnnnnnnnnnnnnnnnnnnnnnnnnnnnnnnnnnnnnnnnnnnnnnnnnnnnnnnnnnnnnnnnnnnnnnnnnnnnnnnnnnnnnnnnnnnnnnnnnnnnnnnnnnnnnnnnnnnnnnnnnnnnnnnnnnnnnnnnnnnnnnnnnnnnnnnnnnnnnnnnnnnnnnnnnnnnnnnnnnnnnnnnnnnnnnnnnnnnnnnnnnnnnnnnnnnnnnnnnnnnnnnnnnnnnnnnnnnnnnnnnnnnnnnnnnnnnnnnnnnnnnnnnnnnnnnnnnnnnnnnnnnnnnnnnnnnnnnnnnnnnnnnnnnnnnnnnnnnnnnnnnnnnnnnnnnnnnnnnnnnnnnnnnnnnnnnnnnnnnnnnnnnnnnnnnnnnnnnnnnnnnnnnnnnnnnnnnnnnnnnnnnnnnnnnnnnnnnnnnnnnnnnnnnnnnnnnnnnnnnnnnnnnnnnnnnnnnnnnnnnnnnnnnnnnnnnnnnnnnnnnnnnnnnnnnnnnnnnnnnnnnnnnnnnnnnnnnnnnnnnnnnnnnnnnnnnnnnnnnnnnnnnnnnnnnnnnnnnnnnnnnnnnnnnnnnnnnnnnnnnnnnnnnnnnnnnnnnnnnnnnnnnnnnnnnnnnnnnnnnnnnnnnnnnnnnnnnnnnnnnnnnnnnnnnnnnnnnnnnnnnnnnnnnnnnnnnnnnnnnnnnnnnnnnnnnnnnnnnnnnnnnnnnnnnnnnnnnnnnnnnnnnnnnnnnnnnnnnnnnnnnnnnnnnnnnnnnnnnnnnnnnnnnnnnnnnnnnnnnnnnnnnnnnnnnnnnnnnnnnnnnnnnnnnnnnnnnnnnnnnnnnnnnnnnnnnnnnnnnnnnnnnnnnnnnnnnnnnnnnnnnnnnnnnnnnnnnnnnnnnnnnnnnnnnnnnnnnnnnnnnnnnnnnnnnnnnnnnnnnnnnnnnnnnnnnnnnnnnnnnnnnnnnnnnnnnnnnnnnnnnnnnnnnnnnnnnnnnnnnnnnnnnnnnnnnnnnnnnnnnnnnnnnnnnnnnnnnnnnnnnnnnnnnnnnnnnnnnnnnnnnnnnnnnnnnnnnnnnnnnnnnnnnnnnnnnnnnnnnnnnnnnnnnnnnnnnnnnnnnnnnnnnnnnnnnnnnnnnnnnnnnnnnnnnnnnnnnnnnnnnnnnnnnnnnnnnnnnnnnnnnnnnnnnnnnnnnnnnnnnnnnnnnnnnnnnnnnnnnnnnnnnnnnnnnnnnnnnnnnnnnnnnnnnnnnnnnnnnnnnnnnnnnnnnnnnnnnnnnnnnnnnnnnnnnnnnnnnnnnnnnnnnnnnnnnnnnnnnnnnnnnnnnnnnnnnnnnnnnnnnnnnnnnnnnnnnnnnnnnnnnnnnnnnnnnnnnnnnnnnnnnnnnnnnnnnnnnnnnnnnnnnnnnnnnnnnnnnnnnnnnnnnnnnnnnnnnnnnnnnnnnnnnnnnnnnnnnnnnnnnnnnnnnnnnnnnnnnnnnnnnnnnnnnnnnnnnnnnnnnnnnnnnnnnnnnnnnnnnnnnnnnnctgggcatggtggcaggtgcctgtaatcccacctacttgggaggctgaggcaggagtaatcacttgaacctgggaggtggaggttgcagtgagccgagattgcaccactgcactccagcctgggtgacaaagctatactccatctaaaaaaaaaaattagttatctctgccctttgggaggctgaggcaggtggatcacttgaggtcaggagtttgaacctagcctgggcaacatggtgaaaccccgtctgtascaaacatacaaaaattagctgggtgtggtggcgtgcctgtaatcccagctattggggaggctgaggcaggagaatcactcgaacccgggaggtggaggttgcagtgagycgagatcacaccactgcactccagcttgggaaacagagtaagactccatctcaaaaaaaaaaaaaaaaaaaagttattgattaaaatttaaatataaattacaagtaataatgaaagtatgaaatttttattgattcataaatatttggttttaatcaaatatgatgtgaagctttaagtgaaattattgatattcgaagtttttttttgaatgtttaaatcatttcacattcacattttttaagtaaaatgaaacaacttgacattttagcatagaatgtttatatggtggccaaaaaagcagattggtatcatgctttatgtgtgttcattctagtcctgcacgtgtagaaatgtaagattttaatgtrtggtaaggtagatagatagatasatacatacatacatacatacatacatacatacatataaaattaggtaagaggatacttttaatgtatggtaagctatgattgcaccactgcattctagcctaggcgacagagcaagaccctgtctctaaaaataaataaataaataaataaataaatattttgtaaaaggtatcatagctgtataaaaagaaaagactaaaaagaaagccactcaaattccatttctcttctgcagatttttttttagttttgtatttcatctgtgattgactgtgtatgtatttttgcatatatacctgcaagcatttgtccttttaaccttaggaaaaaaagtctgattgcaactacgtgtttgggaatcagggagactatggaagaacaatctcagatctcagcgtgaggctccacttgcaatatcacaatttctaaaacatgttgtatgtgggcccatttgccatgtgtgtgtgtgtgtctgtctatctatctatctatgtatctatatatatatatatatatatatatatatatatatatatatatagttataatgtggtgggttctcgaatcacagttgtaattcacatttttctccaccaattctgataacttgcattaagaaattgactgtgtaagttaaattttagatcaataatgcaaattggaagacctagtacaggccaaggcctcattatatctgagtagggctttaagaaagcaagaaagaatcgcttgaacctgggaagcggaggttgcagtgagttgagagcatgccattgcgctctgctccagcctgggcaaaaagagtgaatgaaactctgtcaaaaaaaaaaaaaaaaaaaaaaaaaaaagaaggaaagagggaaatatacatcctcctatccagggtgaattacaaatagtaccagttggttgtaagtggatttaaaattactttttactgctaatggggcatctgtcttcattcaacaaatatatttcggtctctgttagatacagtgtatctctgttagatacagagcattctgttagatacagagaatctctggtagatacaaagtattctgctattctgatcttcctgttagaagatcagatttacagaagtctacatttgctctcaagggaccttcagtctgtttggagcaatctctttattaatttatttattcagtaaattttattcagaaccagctatatggcaaaccctagtccttatgctgaggtttcagagatgataatgggggcagatgcagccattcagttgacttcctgtggacaccagagatgacaggcccctgtccccagcttaccatccagcatataaggcatatatgcccctttccatgaagtataatctaatgagaacagttggagaaggtcaggcaaaggggacaggacaggaactcaggaggaggggatatttagacttacagacctgccctacctaaggtcccacagatggtctgtgatgacagatagcccctggactgctaagactcggatctttaaatataggcccatctgggctgtggggaggtgacagcctgagaaaaagtcattcttagatgcccttactctgttgatcataaaagtaggagctgaaattctcatagcctgagaagctatttgcagcattccctgagggctttgaaacactatcaaacaacaaggagagacaaaacagtttttagccctgctcaactctcatgggcttgccttattttttcagggcatgctctgtctccatcccttggctctgctttccttacattggtcttcttgggcatccgtcttccattccatagtgtagcaagccagaagctgggggaaacatggtgcgtgcctgtaatctcagctactcgagaggctgaggcaggagaatcacttgaacccaggagatggaggttgcagtgagccaagattgcacctctgcacttcagagcgagacttcctctcaaagaaataaatacactgtgtcctctcagcaagaccaggacaacagtgattctctttcctcaaagttccaatcagtgcccagggcttcatgcatattggacagacctgagtcatgaggccatctccgattggtccatccagggccatgtgctcaccccttaattcaggatgtggggtccggctcccctgaagtgcacagagaagaggggttgcccaaaggtgaatggggagaaggggatataagtgcaggacaggtaagaacagcaaatgctcattaacaccatgcagtgatgaaacgcctcttaatcaacccttgctggctgcagttgatttgttacttaccgtgaggttatcatagctttgcagagactttgtgatggggctgtcaacagagagagagagagagaaagaaaagaaagaagtgccaccagtccattttgttccactcaaatgtagatcgtaatttttaggtttgtaattactgatgagaagaatgcctgagccagaacttcccagagatttatctgccacttacctggagtaagtagaaaggatatcagttttccccagtacacctgcctccaatgaagccaactctcaggctctagaagtctctgccttgggatggattcaccagtgtgcttctcaggctggccagtgtggaagcagccttgctgtatttcatcctttaaaaatacagcctgcttgccatctcacgacttttcccttaatgcaacaaagaaatatgtgtttggctgtgaaatcttttttttttttttttttttttttttttgctgtggagcgcaaaatgttcatttatctctggatggtttgtttctggccacctgccctaagtgtatctgaatattgtaacggtgatcacttcttgagtcttggtcattacgaagtgacatttggcatgaatttgctcatcaccacagagggccccagggacccacttgggagaaggtgagttatagcccacaagataacatttctcctggtgactgtcctgaaagcctactttgggccaccacatcagtgtgttgggagatgagttaagaggttttattcttatacatgcggaagaattatgccttcttgagccatgctcaggagatgtcagccttttccattgtctccccgcycccaccgccagccctgcttaaattatcccctctttttaaacaraatatcctaatcttgcaagtggcatatcatgttccttcttttttaagagagaaggagaaattcctgcagatcatcagggactgaggctaactgaaactttggaatggatacagtgctactctcagctgaaagcacaaatcacttccatcacgtatatgagagacctccatgcagcactgcagaggggtgataagcaagagttgatcgatgacagaacacccacccaatttcttgactcattcttcaacgggcagggtctatacatgtggtatggctgcaatgtttgttgataacccctacattcacaaaacgggcgcatgggaacttgtttgctgccttctgccatgtgaggacacagcaagaaagcacatacaggaagtagagatggagccctcattagacgccagatctgctggtgccatgatcttggacttcccagcctctagaactgtaagaaatcagtcagtatctttgtttctttcctttctttttctttttctcctttcctttcttttnnnnnnnnnnnnnnnnnnnnnnnnnnnnnnnnnnnnnnnnnnnnnnnnnnnnnnnnnnnnnnnnnnnnnnnnnnnnnnnnnnnnnnnnnnnnnnnnnnnnnnnnnnnnnnnnnnnnnnnnnnnnnnnnnnnnnnnnnnnnnnnnnnnnnnnnnnnnnnnnncctttcctcccctcccctcccttgcccttgccctttctttctttctttcttttttttttttttttcagacagaaatctcactccgtcgtccaggttggagtgcagtggcacgatctcagctcactccaacctctgcctgccgggttcaagtgattctccttcttcagcctcccaagttgctgggattacaggtgcatggcaccatgcctagctaatttttgtatttttggtagaaacggggtttcatcatgtaggccaggctggtcttgaactcctgaccctgaggcccaccttggcctcccaaaatgctggaattacaggcataagccacctcacccagccaagaaattaatttctgttgaatgtatgttgttatagcagcctggatggactaagaatcatgatgaaaagttgggttgctttcatatttagaaatatcttggaacgggcaggcgtggtggcacacgcctgtaatcccagcactttgggaggctgaggcaggtggatcatgaggtcaggagttcgagaccagcctgaccaacatggagaaaccccgtctctactaaaaatacaaaattagccgggcgtggtggtgcatgcctgtaatcccaagctacttgggaggctgaggcaggagaattgcttgagtctgggaggcggaggttgcagtcagctgagattgtgctgttgcactccagcctgggcaacaagagcgaaactccatgtcaaaaaaaaaaaaacaacaaaaaacacgaatatctttttttgtcagctccatgagggcacaaagttgtatcagcttttttttttcacagctgtgtcttcatcctaaaatagtttctagcacagaacaggactcagtaagttatttgtcaagtaaatagactccttaataaattgtctatcctgtatccagtacaatgcttggcctaatatacatccagtttcatttaatcctcaaaacacattgatgaagtgggtgttaatccctattttacagatgtgggaattgaggtgtagagctgttgaagaacttgcccagggttgcagagctctttcacaggggcagagcatgggctgaacaccagacctgtctcacactaaaggtgaaacaatttcccctgcatcaaactgtctctgatatgaagggtctacacactgtggtttgaaggtcagatgtggcctgtcatgtttttgtacagcccgagagctaagaatggtttttacatttgtaattgtttgggggaaaaaaccaatagaataatgttttattacatgtaaaaattgtatgaaattcaaatttcagtgttcataactaaattttaaaaacttttattgaarttccagagagatctgaagtagttttattggaacacagccctacacaccttcatttataagctatctgtggctacttttgcactatgccagcaaagttgagtagttgggatggagactrtatggcccataaagcctaaaatactctctgctcctttccagaaagcttggcaacccctactatcatctccacgtctgcctttgttcttcttatttgtcccttccctctgaaggcaggatagcatagggtgaccataagactctctggaactagcctgcttgagtctagtcttggctctgtgctgactacctgtagggatgtaggtgagcttttttatttttctcaacctcagattcctcatcaaatggaagaaataatgagtatccactaccttgggttgtatggaatgaaccaagttaacttagctaaactcatcgcttccaacatcgcctcctatgtaataagtgcttgataaatgcaagttctattcttctattctctctctctctctctctctgtctccctctctccccctctctctcatagtgatatggtttggctgtgtccccatccaaatctcaacttgaattgcatctcccagaattcccatgtgttgtgggagggacccaaggtgaggtaactgaatcatgggccccagtctttcccatgctattctcatgatagtgaataagtctcacaagatctgatgggtttatcagagggttttgcttttgcttcttcctcattttctcttgccaccagcatgtaagaagtgcctttgcctcctgccatgattctgaggcctcctcagccatgtggaactgtaagtccaattaaatctctttttcttccatgtcttgggtatgtctttttcaacagtgtgaaaatgaactaatacacatagacacatacacacatgtacccacacacacgtaatttttgtatctaagaaaggggagaaatactttttagttgttctttctgcttcatttatgtgtggagtgcttaatgtggtcacacggatattaattgcatgttttcttgttttataattaagaaataaaaatgaatcactctgacttttcgcttcattttctgcatttgcacaatttggatattttattttgtagtctattaaaatgtgaaagtcagtgtaaagtgtcagtagctttcatgagtgttcttaaaggaaggccatctgattggaatgcattgtatctgtccttccctcttgctggggtcagcccaggactcgaggggaatgagcccctgaggaaggctcagtccttggcagcgaaatccaggcatggaaaccaagcctgagacatgagctgcaggacatctgacactgtcttttaagagacctgcctgtgaggtcctcatcctgctccctacactgcttcagatccacttgtccacttgtagtgagggatagtatctgttccacctgattgattgattgattgattgattgattgtgaggcagggtctcactctcattgcccaggctcatctctgcctgccgggttcaagtgattctccttcttcagcctcccaggagtgccatggtgcaatctcaagtcactgcagccttgactttccaggctcaagtgatcctcccacctcagcctcctgagtagctgggactataggtgcgtgcccccacgcctggctaagtttttgtacttttagtagagacagggttttgccatgttgcccaggctcatctcgaaccccttgactcaagcgatctgcctgccttgtcatcccaaagtgctaggattacaggcgtgagccgccgtgtctggcttgctccacgattttcctctatgaattccacctttcccatggtgggaccaaggctggaagtacttcacaaaggctccatttgaaaagtggctacaaataaaagggaaaatatagtattccttaaaaaaaaagtagcattctatttttccccattggtaagtagtacaaatttgagaaagtgtaaatttgaattccttaataatcagatctctgcaatgtgttttgcttttatcatcctgggttgccatcttggccaagtgtagattattctgctcagggtagccatactgagatcctggtgtgcacaggaaaagagctaacctttgtggatgaaattgtagagtcactacctgcatttgctgtagctcttacaattattttattcttggaagacatcgagagcatggtccaaagctgcataggttgcaagtgggtagaggcagaatttctctccaggcctggtggattctaaagctgtttactcttcacccaccatttcctaggtctggtttcttggttaaatacgtggaagagtggatggacagaaagacagattgatcagttctccacaggcttccccaaactggccaggtagaaataagctaagcaaataaatgacttccccattttataattttctgcaagtcacataagccttcatgttgtttatttcttggttttagatttttttaattataaaagaacattattatacattatttgaataattttttaaaattatagagctgtctaaaggaggcattaaaaaaaccctttctattccttcatctaattctatccctctgaggcaaccatgattagtattttgtacttcttgtacatcctccttcatgttaatatagatgtacacatatataagattttgttctcattttctgaaataagtggacacatactccaccatccccaggtagtgtacagtgtgtgccctttcaggctagtatgtacagctttaaatcattcctttacagagctgtgtaatattccacaacccagaggagcagcttgaagccagctaaagtatgtatatccaagtggaattaagagcttcatgcgtagtttcttgattttgattaagaatctttcttaatagatatgtcagacgtgactttatgctgcaagacatagcataggtagaaatttttatgtcacaggtgggcctaattaaccttgattaatgttctgcaaacccggatagactggagactcagaaagggacgcaaaagctagyctggttcccatgttagtccctgctctgtgagcagctgccacacagtcatgctgatggctcctgcagcagccattctggtttgactgtgctcgtgctgccctgtgacatattgtttaacacagtgagttatgacacagggagcgaaatcaagacttcagccaccgatttaacaaactggtgactcggagatcagcagtccggcattgccatcctcatcaaaagctctatctttatctaaaatttattagccaacttcaaacctgtttgccagctcactaatggaagccttttgaatcaatttgctcctctaatttaaacagcatttcaatgtatattgtcgaagcagaaaggagttgcagcttctggccagtagaattaattatttattatccttttcataaatactttccgaggccgacataactgaaaattgctcgggctgtttgaaaacacacacacacagttttccagtggctaatttgaaaaatgtcaccgtattagttttcatttacatctgtcaggaaacatatctatacataaggaagtttttttttttttttttttttttttactttcaccaggtatttttttgtggagtatgcatttaattcacatttacaaattggtttctgtttttaactaaaggtactttttcagcagaaatgatgtgtatgatgtcatatctaacttktgatctcactggtatttgatgttaagcctcaaaatcatcaaattttttttacggcactgaaaaaaatacataaatctgcttgattggttcatagaaaaagacccctgtgattaaggtaatgctagtttttgcattttctcctagctgtcattggttggacacagtgatcctcgggtctcttgtgttttcacatgtcttgggaacagaagtgctggcagctttggtttcaggccatctttccaaggaacgttgtctagcaaagaaacttgcaaggtacagatagtgtctccctcaggagcagaggacaggatggctttctttccagtataataaagacagtgcctccttccaggacaacggtttggcagatttgcttgataaaggttggggtttstaagcttggggctcytcagccatgactgaaacgtacyatgagcacggcatctaccgggctgttccacatcctccctgtgkgactaggggccagggcaatgggaatcagtgcagaaataaagctcatgctgtttgctstgccatgagtaacgaagtcctctrtatctgatcctgggtctcctgttttctgctagcttcctcaaaacttggtagctaactcattaacttacaaggaagaggktgaacgtgtagacccttcacagtttgaaaaatcacctgatcaataactgagattatgaaaaggtaggaatgaaccaattatggcccaaaggctaactccagccagtagccttttatttatgacccgttaaaaaaaacaaaaatgaacaaaaaatccaaagaaggctgtgtgccagagacgatacgtggcccgaagatgaaggtacttaactatctggcccttcacagagaaaatgtgtcaaccctttcctgtttgcgttcaggtcaaatagttgcattgaaaggcctcatcttacaaatgaatcaatatttagtggtttgaaaatatgttgtttaatttggggcgattcaatatcaaattaagatttttaggtttatttatcgatctytagaattacatcaacattaagctaattactttaaattgtgtttttaagtaaccaagaatacatctgtggacgctgttctgtgccatcttgagtcacgtttttaaaacaattacctttgatgatttcgtatgttatcccattcacagatggtttttttcgtccacctgagtttcaaatctgttgtagtcctggaaattttgcttaggttgaaggaatgagtgcgtgtatcttgtcaaaggaaatcacaagcccatgtaaactcgctcttgcttccgtcacctcgtgctttgaaacataaccacaatgtgctgaggtttcacattgttacatcctacaagcgtgcttacctgcatcaccttgctgggctgtttcagcattggaatatcactgggaatctcaagttcccaggagccaaccacaagagcttcacagctcagaattttcaagatgtggatgtaggcagggagcctatgtagtaattcaagtaaacatctcttcttcttgttttccttataggatgatagaaggtcagtgcttgttcaccccagtgaggtggagcctctgaggtgggaggttttctctcatccttgagtttatctttacttcctggtcattatgcaagttaatttttctagcagtgaaaacagtcacatgggactctgcccagcgagggcgttgggaggcctggcggagaagcagttgtagcatcgtccagccttctctacctaacaagggaatatgtgaggtagggtaggacattttggtagcagtcacacagcccaaagagcatggtgaatttaattagtctgccacacctgtatggccttaygttttccgggataacttaacaagcattgtgtgcagccaggtcaggcagatggaggttctaatccaggctgcacacctcatcagccaggagactacagataagtcagccaaacttttggagtaacaagtagctcatctgtaaaacgtggatgttccaatttatgtatagccgcataatacattaccccaaaacttagaggcttaaaacaacaaccattttgttttatcttgtgatttctstaagttrgggctcagtggagtgactcttctgccccttgtggtgttgactggggtcagtcagtggtgctatgctggaggatgaattggactggcacttcagctggtccaggatggtcacccatgggtctggcactttcacgaggatgactgggatgcttggctcagctgagggactcttrcccagagccctacacatggcctttcctgcatggcagatatagggccatcagatttcttacatggtggctcagggctcccagaggattccaaaagaaagtaacaggaagctgccagtttcttatggcctggcttaggggttggcacagcatgactgctgtggactaagcagttacaaaacccactcagattcaaggggagcagacatacacctcactttcttctggtagaagtgacaaagaatttgcagccatctttattccaccacagcaggtaataatagcatctccctcattacctatagaataactccaaactttctgatgattaagtgagatatcatgtaaagtaccaagcaccttggataggcaatgggaaatgttcacaacgttcccatttttacctataacagcagtagcaataatgctaatagtaatgatactagtaataaaatcaggataatgctgtttttaattcaccacactgtatgccatttgcttaaaatcagaaaggactcatcggtaaggagtagggtggtagtatcattttggtctgcctttcacccccacaagacaacatccttaacagcagctatgttgaaggtttaggagtgcttgtcattagggtctcatttccaaaatctgggacataataatagatggttactgattacagggatttttgtttgtttatttgtttgtttgtttcttcttgataatctctttcattcatcattccttcatttccactcttctaattctgggcattatatctttgtcagagatagagtcttttagctgtttcttcacctcccaaatccttctcaagtctgttctccgcctgctgtgccttcctatagtgtagctccaattgccttcatccttagaagacctttaatgatatcctatgccaaacttcctagcctccacctgtaccctgaattggccctagcctagttktccaaactttatccccaggtggttgaactttctaagtttccccaagctgatcagtgttttggggtggtatggaactcagaatagatcactttttttattgactaactctgaccataagtatgcttctgtgcgagcctgacctccacggtaccaggcagagaacaacatgtatgcagagaactcattcactcaataaacatttattaaatccaagccatggggatccataggaggaatttagagcagagttgtcgaatggtcagatttgcctttcagaagaccgttctggcagccatgtgagaaaggagggtggggagacctgctgggaaacaactctagtcacccaggcacgaaatgatgagcccttgagcaaaagtgattgcagtgagtacagggaggaagaggaaacattttgatagatacttggtaaaatcaacaagatttggccaacagctctgaaggggatgacaggcgtggtgaatggagaaggaaggacagaaggctagtttgggacttctggcttggacagtgtattgtgtagtggaaccatcgctgaagataggaggagtccttttcagtcatactgaattcatgacgcctgtggggcacccaagtggaagtcatccattggcacctggatttagatctggcactcaggagggatggacaggatagacattgaccagacacaattatattggcatatttggactggagaacccagcatctgacttaaagagtctgcttctcttcaaaattgcttaggtgttttcaaactacaaacaaatacactcccaaaacctcaatagattctcccagtataccctatattttggccaaactggaatcacatcctggtctccccaaacactgcttgctttttgttcctttcttgctcttccttctgattgcaatgaactccccatttccagtccccatcctccaatcccttcatgtccagctcctgctcatcctttgaaacccactggattttaagattccatctgacaagaatgatcactgttccttccagttcttcaagcactttttctgtttttgatgggatttatcacttgaaaatgcatattatagtaatttctgaattcatcctgattctcctactggtttctaaactcttcagkttagaattcctgttgratatccctctggccygaaattcctgaatgagttaagcaggacacctagaactatgcagaggtaataccttccttgacctgtcccttttctgggtcagtttgcccttcatgatttcggcaggagtgtgtctccttccattctggtgaacacatccaatgttcaatgttgctcatcagggtaagagttctaagtccctatgtcttagagacaggggttatctagctttgtcttctgcattggcttcaggcttcacatccttcctggacatgttcaatgctgctttcgtttcttgggcgagggccctagaatcaccttagacaccttgctctagacatggccccatcgtggtattcccttttgagaagacaaagattttaaaaattctttctcccttaatgcctcatgaatgcccaagcagcacttcatggaagtacactgagtctctactgcttgcagggattaaacataacattctcaacagtggtaagagagcctttcccttctctttggctcgttttcagtttttattaatttcctgtgcttctggttcatgaatcccaagtcatgatgtgaatcagttcagttcagcaagcactgagctcccacgatataacaggtttttttcttttccgagctgtggcccatgcagagtttactgagacttggctcttgcctttatgctttaaggatcctaaagagaagatgtaattataagatctaaaacgtggaggggggtggtgaattcagcctgcaggcatgtgtttgctgcccccacccccacatccyctttttttaaagttcgcataaaaacctggattcttggtttctcttaaaaaactggaaggtctggcacctttgctcccacatttcccgggcgcagcccttgactcaccctgtacggtggccgccccagttggatgatggggcttgtgcccaccgggtcagctcacaccaaccagcccctattaatttatacctggcccgctttccaaattgacattacctggctggtccgtacgcatcccctgcagtaactggctttctggaggtatgtgctgaggatctctttggcttctgcatctcaaaggatgagtgatttagccaggtggagaggttggggcggtatcctgaatgaaagaatagcgcagacaaaagtagtgagttgaaaacagaacagcatggcaggctcccagtaatcccatgagtcacgtgttctgcccacatggaatggatggtggagaagggaggagggaggaggttgggccagattaagcagattgtccccattggtccatttttaaatcttccttttggtatttgtcccttaaggcaacactttcagtctcagaaaaaatccagtaaagggcaaaccagtttgggtgaatttctttgtttttgcagcatgtctggtcccaaagtgggacctggagtccttccgacgaggaagtgcagcctcttgtcgaggagtgcactgggaggggaggctggacttctgggctctgctctgcctctaatctgctgcccagcatcagccttagcccagacccccaaagttcctgggcttcattctgctttgcattcatctcaaagttaagccttctggctggcaggggtttctgagacagactgacagtattagcgtgctgcagtttcatgatggcaagaaggaggttaccaaagccgttttcatacaccttaactcatgagtggtagtgagtggccccaggtgggaagcacaggtgatttggagctggctaacctccttcctttggctcttactctcaccagctcttagacttggggtaggttagttagctcctcccagcctcagtttccctgtttgtcaaatggggtcatagagggtgagaatcagagtttatgcagggcatagcactagtgtaatgctgggcagagagtgagcatccagcaagtggttttgacaatgataataattataacccaagcgacacatacaatttaatcaggcactgtgtgtccacagcgatgtcaaggaacaatgcacaaagcagagtttttccagtctcctgatgtttgagccctgcgcgagccccactcttctcccttttctcataactgctgtgagcaacctcaaatccttctggaagtaggttggttatgaattatgaataattaaagaaataaactctggctctgcagctgaaattgggatcgcatggagaaaatagaaagtccagtgtttgtagctgtgatctctcagttgcttgcatgaattgtgctttaagaytgtaaaattttagcccattaaaaataaaatctgttgctttccacccacacctggcaatttggtgagggacgggggctaggatatttaatgtctgaaagttttagggaggcttttatgaactgggccatctctccttgtccccatttttctttgcatctccgaactctcattaatttttcacaggcttgtgatggatagtttttatttattcacgtctgagattccgttgtgtgaaaaggactcattttataacattacatattcatggcttgggatggatgggataaggaacttattattaatgtgtcactgtgggaaacttactctagttcatttgcgaaccttgttaaattcggtgtggtcagcagacccggtgaagttttggatacattctcttaacagagggcaaagagtttgctgttgcttttccttgattcagtaaaacaagtttaaatcttatttaaatcgtttgaagtagcaatttgaaaggggaggaaaaaaagggggatggcagagattaagtagagagagaagctccgattttcttgttgaatagccgtgtttcctcagcattctgtagatttttggccaggtttgtgtaagggatgaacgactctctataaaatgatgtmaggatcctttctttcctgcccattgccatttctagcattctctccttgagggaagttgcagttttctccctctgtgtattcatccttctgacctgtgctccggattccagggagttctcaatttggagctcataccgacatcacagaattccttgcctgggacaaatagagggaatattaacatagcatcttgtaaatcaaagctgggcagggggtgggggagggcacagtggggaacctggcccaatctgcttcagtgtgagcttggtaagaaggaagcatatgttgcatttagttctctgcaaagacaggcgctgctctctggcagggacagcgtgtagggtttgcatgatttgtggggccgtttcatgtttgcacggtttggcttggcttgggactctgccagtggtcactgcagtttaacaaactccccccgggtgtgaaggaaagcgagataaatgcaggaaaaaggatacatttgtgaaatctggaaattttacataacaggcatcagatttgaagaatgtccaaaatattacgagtcatagcacaaccctttgctaacaccatggaaatttttaaacatggaatttgttaatgctgacttggcccaccatggggttaaaaaaagtgaatttctttttgataaccaaggtgatgatcttatgaagttgatgatggggtgtgaacggtgtgagtgggggacaaagcaatgaaatatcccttaaaatgcatcctctgatgatgtttccataatgccaaacatttgtttctctccaggatctcattggcggtttgctggtattatattgccatttatattggaaaggcaggcagtgcgaaaactgtagtctattaagagtttgtgagtgtgtgtatgtgtatacagtgaaataatatctagtgtaatgtgaagtgacagtcaaaattacagcttttctcttgccgcaagggtacttctctgccaagtatagtaatattgttgtagcagtgttcaaggttgtcagcaattctggcttactctgcagagagccataatagtgtgtggaaggaaggagcttcctgtcaggggaaatactataattttgatatatatttgttggtgccaaactgcaattaaataggaggtgttggaagaaggttttatttaaccagcttgaatttgttaattaattagcaaaaacttatctttggaatgcttcaagaaacagttctatgttgttctcataacttaattttacacaactgtcttttgtttgtatcttacagaaaacaaaataccaccctccgccagaaaagtgcagaataaaaattttccactagcaaaagaaggaaaaaataaaagatcttgaatagtctcatcaattacatcttcttttgtgggtatttcctggtcttttcatgttttgacttctatctcggtgatctgacagacatgtacgatttgcaacaacatctattatatgatttaatttatacctttatcagtttgcagttatgctttacgactcttcaggtgactaaagaaaaagagggtgttttaaagtgtgtgtgtttgtgtgtgcgtgtacgtgtatacatgtgtttttctgtgtacataagtgtgtgtgttttaaattgtttgaaaaacactagtccatctctattgtattatctgagggatgctagctcgttacttgggatagtaacaagtttcttggtgacaactcctcctcccattgtcaaggaagactgaggatgtcaccagagttcgctgtcaatggctattcagatgaaaaataccttctttttgaataagtagaaaaaccatgggggattgaaatagcaataatatattaaaagctccaaggcagttatgtgtgaagaaataaagaacagaacagagagattgtgttgttttaaaaagggctatttaagagtcttgaaaagagtgtgtgtgtgtagggggacacctccctctcatattaagtattttgcaaattaaatgagtttcattctcctataaaatatgagtctaatcacattttatatgattgtaaaatgtgtctacttttgtctctatctttcatggaaaaaagaaatattcccaaagtatattataaaaaataattaataagcaacttttcatcattattttctgaggttaattattaccctaagaaatcaatttcaatttcttcagtttgaaagactcatttgtgatggggtgtttccaaaaagagagttagttaaatgctatatggaagccttcattccctaaagaaaatgcctctgctgctggcagtgatttatccagagctgtctcacccatttatgccccatgccaggagaatgtatggaaaatgtaatagagctattagaatccagtgtagtagattggtaatagtaaggaacaacagttgtcttcacattgttaaaataaaagtgagataccctttaatcttcgcaaagggaaataactcttctgctaaccctcctgcccaacctgagatgaagtatcaggggatgcagtatggatgtattttcctgacgattggtcctkctgtcctgggacccaggtgtgagtgcatagggaaaagggaggagaaatttaatcctgtaactatctccttatggaaaacaggaaaccacaaatgaatcaaatgaatccgtttcccctctttctgatcctctgcaaaagtcatcaaaatcactctgttctcaccaggcaactggagtttcgtcagctgagtctagagtgttccaggcagttacagctaatcatggcaggctctacccaactgggggaacaatttagctgttgtgggatttccctttaaattaaatatgttcttcaggtacagttttttaaaaccagtttttctcccccacttttaacctactttatcgtccattgctgggcctagaattgcatgtccattggcatggctgacgttatatataaatatttggaattgtagttgtaatgatagatattatatatatttcacatgttttaagattaacatattaacagtttgtgatattcaacaaagaatgcaataacttctgcgaaacaggtaagagaaacaaccagtcacttgatctggatattgagacgttacctgtaggatatgtattaggctgttcttgcactgctgtaaagaaatgcttgagactgggtaatttataagaaaagaggtttaattggctcacagttttgtaagtggtacaggaagcatagcggcttctgcttctggggaggcctcaggaaacttacaatcatggcagaaggcaaagagagagcagcaggtgacatggtgacagtgggaagtgacagagcgtggggtgggggtgggaggtgccccacttttaacccttttcctgtttaggaaaaaaaaagcgcagctcactgccagcgctcatttaattttacataaacatgctctttgaagctgaagcaaatgtgaccgattttcaaagtgataataaaatataaaaacagttcttggaattatttctgaacagaactaacatcagaatcatctgaatcatcagaattgtgtattttggaaaaatcggattcatcaaatgaatcttcagccaacaactgttcgagaatgatgttaacatcacatgcaggaatgctacattttctcggatttgacattttcagtgatggagaactattatattttgtaaatggaaataccactactaaaaacagaaggctataaatagaatgatatccttcgtttccaaagtcgatatgctagagtgatgtgaaaaaaataataaaagcgagatatttcatggcaaagcgatctcagggtaaacactgcacaccagtaagtattcttggggcaaatgggaaaagggttaaaatgaccagatctccagagatctcactcactatggtgaagacagcgccaagccatgagggctcygccccagtgattcaaatacctcccattacggacatgtttcaacatgagatttgrgcrgggacaaatatccaaactatatcaggatcccagcagactgggtgggtggaggttcagggatatctgggaaggactaagaatagctttttcttttagtagatcaggagtttcctcttacacacaaaaagctccaaattyaaactagcttaagaggaaagggtcattactggctgacaaaatgcgaagttttgtgcaagagtcagcaaagtttctctgtgatgggatatttaataaatattttggggccttgtagtgtttgttgccaactactcaactctgccctcatagtgcraaaacaggcataaacgayatgtaaaggagcaggcatggctgcgagaaactttatttatggatactggaatttgaatttcatatacattttcatgtgtcacaaaatattattctttcccccccgcccccaaccatttaaaaatgtgaagcatttttagcctgtgtgctgtataagaacacagccgtgtttggcccagcggttatagtttgccaacccctgcttagagtctagctttattcagagcttaaatatgtcatcgaggtcccctctttatttawtcccttagttttgatgatcttttatgggttatattcttcaaagggaaaattctctccraatggggctgccactggcagrcgagcactgtcccatcttggcttgttcccccagtgacaagaagctgttttccccactacccttggcccaaaagccacagggagaaccaggattggcctagttttaggcagacacctatccctgaatcagtcatgtccccggatgatgcggttctctgcagcctgggcagtcaaggctggagataattctctgcttctccacrgagtctgagaggccccgttccctaatggwaaaatgaggtccaattttgcaaaaggaggcacctggggaaacattctggacacacaaatctatagcttctaccgtcaatctgctatgatccttttatggttctgacgttgcarttttatttttgcatgtttctagagacatcaggaggggatcttttcgggatgtggcttcagaaaggagcctgttggatggtctcttactagtggtcagcaaagaacagttcttttgtaaattgcactgcattaagagcattcctgtttccatctcattgatacctgccttgcgttctgttacctggaagcacaggtcaaggtagtcttcttgttccactgatttgatgggggtcaggatgctttcagaaaggaaatgagaagagtggcttagaacagggaaaatgtggccgggcgcagtggctcacgcctgtaatctcagcactttgggaggcctaggtgcgcagattacgaggtcaggcgattgaggccaggctggccaatatgatgtgagaccccatgtctactaaaaatacaaaaaattagccgggagtggtggtgttcgcctgtagtcccagttactcaggaggctgagccaggagaatcgcttgaacctgggaggtggaggttgtagtgagccgagatcgtgccgttgcactccagcctgagtgacaagagcaacactccatctcaaaaaaaaaaaaaaaaaaaaaaggacagggaaaatgtccaggaaggatgtggcttagctgaagatcagcttcagcttgatcccacgggaagctctggagggtgaattctacagcagagttggtcctgactgagaccagggcctggctgacctatggcagtcagcgatgagccagtgtctgctggggaagagggcggcgtggacatannnnnnnnnnnnnnnnnnnntggggcaggaaggggtagctgtgagatactagctaattcttacagcttctgggttcaccagcccggcaggagaatctgggttgaggaggcaacatgacaacgtgcctaccttcaccagagagactgctgtcaaaaatcactccatccatgcaaggaggaacgatgcagacacagaaattctctgctgtgagggccagcactgtagtatttactgacctgctccccactccacacctccaagtgcaggtgtacagactgacatcaaacctttcatcccgccctcggcctcatacctgctttccactctgtgacctatttacttcgatggagtcattttcaaataacttttgtttagtgaaactcaaggcttttcaggatgctgtgctaatgtcttccttttttaattgagtaaatatattatacacagctgggtaggttgtttccttgctggccttactgctacaatttgaaaacggatacagttttctttaactcacataggatgaatgtggcatttattcctggtttcctgtggctctcctcctttagaaaacgtatttacatggacgtttttgaagcacttcttaagacatcgaaaaattaaaaaagaaaaaaaaaaagaagaaaaatctcttttccctcccccaaacaatggttacatagtgacaacagtgggttgagctaaattcagctacgtcaaggaagagcaataaaaggagatggattgttctctaagcttcactttattggatattgtaattgacatatagttgtcatttataatcatctgtccattcctgtgaggtgggagcagtaaagttaattgtggcagctcatttgcattaatctcacctctgaagggtacagtaacccattaatatcacgtcatgatgaattatcacaaataacattgaacatattgattaatgatctctgagatttgtatctcgttaaaacattttgttagctctttaaacttttaagccaacaaccattgcgtgtaggaggggtttagagatcatctgagaggtggtggtgggtggtggtgtactttgtagggtcactggtttaaggggttggacaacccgttcccatctgattttcctcttcttcgggagccaagtactttttgttggtaacttccgtctactttttgcaggatagtggtttcttcaaaacagtggcttctttgattgtaaggtggctccgattctcaaatggaatgattttcttaagatttttaaaaattaccccttcaacaccttaagtgctggctttctgaacctcttgcccacctaggcatgcctgctactttgaagtggcaagagttatctttgtctattacatcagcattcccaaacttacatgttaacataaacatggagctcagaggaaatgtgttgtttgagatgaaccatcgtttcaaatgtcacttacttcttgttttataaagtatcattactcttttcttggacacagtctcatctttgaggagtttgcagattttatctcctgtggacatttctacaaaatcaatcaacaaacttgagcagagaaatcatcatactagccacacacactctgcaggcattaataaaataatagtaaattctctttaaccaagtcctttgcagaatttcctggtagaagtttaaatgcaatagatgcagtaaagaaaagggttggcttaagagttgacttacaaagcttggtcctaacagctttttcctttatctgtttcaagagtcatacgatatttgatctttcaaacttacgtatttcttccattatgtttagtattagtttcgttttctcaagatacatatttaacaactagcaaaatgttggaagcggtctcctctgctgtctatttagggaaaatggaactgatctttctgaaataggcatgcatgtaatgatgatgtcattaatgcttggctagctggtggacttaaacccagagggcacttctgaaaaggggcaaagtgcatctgcttctgctttgtttatagactgtcagccttggatctgtcactccctcagaagggaaggattgaggccaggcaaggtggctcacatctataatcccagaactttgggaggcgaggtgggaggatcacttgaggccaggagttcgagactaccctgggcaacacagtgagaccctgtctctactaaaaaaagagaaaacaaaattaaccgggctgggtggcacccacctgtagtcctttggaggactacttgggaggctgaggcaggaggatcacttgagcccagaagttcaacattatagtgagccactgtactccagctgggtaacagagtgagaccctgtctctgaaaaataaaaaywaaaaaaaaaattaagttagaagggagggattacgaccctcatgtgtatcaagaaacaagctccatgaagccccrtaggatggctcagcaccagaacgaggtctgactgttaagcaaagtcaagtgcatgatggctgaacattgctgggggaagattttgcaattatgcattgtttgtgcctttagccagtaggtaaggacagtggtaccattctgacggactctcggatgcttggttttatggagggatcttaaaacagtaatcggcccatatgtgcagcaacctttgcacctaaatagctgaggacaaagtaggttgcttacttcaagagcccttccctttctcttctttgtcaggcctgtaatgttcctcacccactgagtatttaatatctgtgttttcacatcaaagaacaagctttctgtctcccaggatagtatcttgtaaagccagcctctttattacttcaccagttttaaggctttattacttgcgacctaaagcctgctagtgaattatgcatgttagaactcacagcaccgtctctgcccactcttttgccacctttttgggggtccaaaaagtacaaggcgagatcgacgtgtgttcattcccatccatggtattaatccttattcatttaaaaaaatctgctaacggaaatatttccattcagctcattaatcaattgtgattttcattcccttgttttgtaaaagctgttgcaataaatacttttttcacaaggcgaaaatccaagagatggatgcagccagcgtaattaattgcacccagttacaggagatcagcaagtttgtgagattcacatgctgctgtaccatatggttgcccagtgggcgaaaaatttgattaatgttttgaagtagatttttttcagcaaatattgcagccccagatgaggtgggggttgtcccccccttttactttctagtattgttagacttagctgaaggaaacaatcctctgatttaaagcttaataatactgtgattcagtgaaaacttaacatgcgataaaaattacatttctctcatctcttgtggatacagaaaaataatacatgatgtcttcgtttgtaattaaggaaaatgtgatcgttggattctaaaacttgattcttgattttttttttcccctaagaaatggaactgtggttttcactgatgcacttttggtatgatttataagtagtatatttgggcagactcttcatactcaaagcagtaaaaaataaaataaaataaaatacaatgaatccacaaacagcttcttcttcattatgtaccctatacctattagagcatcataaaatataactatatgagtatcatagaaaagttaaagctgtctctactctgttatgctaagatatattagtttcataaccactcaatatattcatagttaatttatcctttattttaaaaaaatgtcctgcagattttaaaatcaattttatagtttcttttctgtttttagttagaaagttcattttatcttagcagctccttgtcatactgggcacccattctcttaggatgctgcccttctgacttttttctccaatacctgggagggaattagccatttggtaatacaacgggacaagcttatggtaggtctgacctcagcattcagaaaaacaatgtgaaatttgtaatatgtgtcagaactggcaatcaacgccataaggacaataaaataaaatacatttctccactttagtaaatgaggcttcatgcttcctatggcataacttttttgttgttgttgttttttcttttctttgaaacggttttaaatttctaattgcctaagcaatctatgacactccttcaatcttaatgtctgttgaaatgaactagcatctcaagcagttggagcatcatctttaactagacatcaacctggttttgaatcctttgagttttggcaaatagaaaattcatccagggccacaaaaaatatctataattttgacccagttgtagtctagagagatacttagttcaaaaagaattgtgttatcgtcatcaagcaaaacaacagtatatgctatcatctctgagatgtcacacgattattgctttttttttccttttaaattttttctttgtgtctaaagcagtttaagagctctaagtgtgctctgttttctgatggcttaacaagggactggctcaatcaaaatagagaaggaaaggacggagaccaggccaaaacggccatctcctctgattttcgattcatgatataaatttttaaacaaaaaagttacagtgtttttggtactttcactaggcttctaattttttttcctaaacttaaaaaaatttttttaagatcaattatgtaataattagccacaaaggcacaagaactgtttcagtagtggcctgttttaatgttccattctgaagaaactggtacagcctttctttcctgagtttgagctgaaactctctctttcccttttatcaggtcgctcaaaacagatttttagagtgaagcagttttagggacaacatttaggagaaacatttccctaagattccctaacatttttttctttaatttagccatttctaatgaatattttttaactgtgcaatttaagtaatgatttttttaatgcctgctaccttcaagacacttcgtgtggtcacctccaattatagactaggtttttaaatgaaaaacggaaacacttttaaatttttatttaatatggccggtgaaacatgaacaatatatgatcagttggcaggagacagtgtgatgaattatttatgagtttacttttttttttttttttgctttaacagcacatacatatatgaaattcattaccaagtgataggacgggtaacccagaggttctgatgagggccaggacctcatggtcataaaagtaacattagacctattcctagtaatttgatctaggttggcctgatttttgttgtggtggcagtggtggctrtggttgtcaatttaatggaatgtatttggaaagagcaagcttcttcccaatgcagtgttttccctgcaaaggagaagaaatatatttcttgcctctctttccttagtcctgtgtgcttccccttgatttcaccaggacaattttataccmatcccttgtattttagaagagcctgatacatttgcaaggwctctctttatattcctgaattttgcatccctagacatcatcctttttgagagagaaaattccgagtgtcagttttcctttatcggaacctccttttatttgaactaaccacaatgggtcrtaatttataggcccagtcagcgcatcattgctcagatagagtcatttacctacaagtatccatcagttaggtgggggctgctagattttttaagtggaaaaaaatccaaacaggttcaggaagaagaagaaaaaatcatcctgggggcagaagaacaacaacaaaaaattttccttggggccttccaatttgagattgttgagtgttgccaagcaaaactaacacgcagtgggaaggttctgcttttctcacaaattctcggttaacacaaggcgtgccaacagctggtagagcgagagtcagggtgccaggctgaaatggagtggaaggcagccctggctggaagtcttgctgggaacctggagcgctgggaggtaaaactttacttggtgctggcagcgtcactatgccagtctgtttcttcccgagcttcaggccatgctgatgttcaagttgaataaatgagagctaatgattttttaaggcgtttttagtgaattgccgtgggaatgctaagttggcaagaataaaacctaggcgaggagagttgatttttgatgacccaaagaaggcatgtcctagagtggtttagtagagctcgaatagtctaagattgttccacatcaggaaaagtgtacagttatcagaattacttactaatgaaaaaaaggggaaaaaaagattattaggctgcagggtagtgggaaggaacagggtagcaactctacagtgacttggtctgagaaaccctgtaacttggatccagccagggaagtacttttcccaacaatcggttccgctgtcctgctgtgaccagtaacaggggaaaaaaataaaactcccctaaaggtaaatgattcacctcatgaacgaagggaagaataagagacctaagtttatatacacagattccaattgtaaaatcaaacctattttgttttctaaataaacaatatttgaaaatacaacattgcagtcttgttttcttttatactggctaggatggtctggtcctttagaggaggtcctgaataaaataatatgggctgtagagagaaacgccgtttgcttgataggtgtttttgtaaaggttttactggcctacagtgtcagtacattgcaaatttaagaatgttcactgacatttttagtagccacttaaaaaatttttctaagcaatgatgtcattgtattttacttataatcagaagtacatcagcccgtgaatttagttaaaggtttttaatgtcacttttattacatttttactgtgcattcatgtgcacacacacacttttaagcatttttgatttatatatccctctgcatattttgtgccttgtgatgtgtttaacgaatgacagtgtctttagtgcattgctrcttggggtttctacactggaagtgtaatccgaggccttggaattggtcaaacaaaactcacttggcaacatttacttagagagcactctgcgagcactctgcgagcggacatgtcgatatcagctccctcctcgttcccccccccaccccccatcccatgtttatttgtaattaaagttaagatgcttgagaatggctttaccattaatctagaaacatagagttgtttcctggtgaatgatgtatgacagttttctttgtgcttcctctgaatagagagtagtttttgtggcattgttacagagaacagctttcctgtagggctcacaggctcaactgtttcaaactcctgttgttcggtaaatctgtcagaagggtctgcaagggaccgtatttatgaagagagtgtagagtggtcagtctaaaaagctccttagtgtagtactttgaattttaaattacacacataattcaaaggtaatgtaacttgccgtgtcggactttagtccattccgttaaatggagaaaaatgactgacgtgaagaatgacttattgattctyggtgggaaaatgacttctgtaatatgggaagtatggtaaaaggaatagcttaattatttagggagcacttttcaaaatgtgcttttacagcagtacaaattgtacgtatacaaatggtatgactaggttctttttttaaaaattctttcataggagaaagttatgagaaggcttatattatttcgttgctaaggcaaagtttaattttgcttaaattcctgtaagactaactaagaaaggtaggaggagtgatgagcagtttcttaaccctttaagaaatatgacttgttctaattgccttttcttatttacattatacttaggctggtgttaggatgccgtggctgccaagtttacacartgcactttctctctctctttcttcttttggtttatgatgtttttcartagtgtcatggaactcacttaatctgatttcatcaagtaaatatatgggaagttgagatgacatatttttatctgacatttgaagaaatattcataaaatagcagataaaatatttattttggccttttcattctgatctctcttttgactcgatgtgtattctttgcttaaggaccacagcctaatgttattttgactgcatttcacagtgttggcggcctttcagataaacagcatatttgtggttaattggctgaacatgttctataattataattatattaaaaccttaatgttcttgaacgtttgcccgcgaaggccactcacgtgaactaagttatgtttctgtcgttataactgagctggctggcggctgccattcagcaatccaggcaggactgggaacctgggaaaactgcagaggtttcttattatttcggtctgaaaccgctgtttggatagttttagaagttgaccatgaaaattgccttctggttgtaacttggatccccaggtttcaatctgtgggctaccgtttcttgggattttcagaaaggattggcttggctttttatcaaagttacacaacggctgtaaaaaataaataaaaaaaaagcaaaattagcactttatcaagtttggggcatatttccaaggccaccagggagcagggaargtcaccaaaagaccgctccttgaaaccaggcaagaagccatctttgcagtgagctgagaggtctgatggccgccagctgagggagggaattccccttttgtgccttcgggattgatagagaagcccagtggacttagcatctgggaatcccagattgatcttttctggatattgggtcaaccataagatggtacctttccctgtgtaacaaagtcagattctgtgaaacacctgttttttgtatggctyatgagatgaggatgatttttacctttttttttttttttttcccttgagacagtgtcattctattgtccaggctggagtgcagtggtgcaatctcagctcattaacctcaggtttttttacagaaaaagtttgccaccctctgatctacatgatgtccttcagtttctgtctctcaccagactgatggtgccatgagggcaggggcaactcctatcctaaggcgtggcccatagtaaggggtattggttagaagaatgaaagattgaatacrtcaaagtgatgagtacagagctgtctgtcattttcttatctttggcctaacaactgaacacattttatgaaatttgcaaatctgtttccaaacatgtttgaatggatttttatggtcttttaattaacccaataaaaatggtaacaacacagcaattttaagaaaataacagagccaagtattttttatagctatgcatgcaatccacattacacccacatgcagtatttctatggtccaaataagtatctgtcggacttagaatatttaaattaggatttagttgaaagattatgttctatatcttttttttttaaaaaaaaggaagaaaaataaagctcttcctaaatttatttacatgttggagcaattctggcactgctaaataaggcaggaaattccattaagtttaaatgtgctgcccttaccctaaagtgtttggagggcttcgtagaagagccaaatagattcacacagatyttatttgtagagctgaatgtgcacttcattaaaatactttgtaaggtattcaaggatgggctaggagggtgaggattccaaatcagaatcttcaagccagtgatccaggccaaaggtattctgccagagtgtgaggaaatttcacagcctcatggagacacctcccctccccacccttgttgaacagactctggaaaagtcaccatttcttgttggtcctttgctcttggagcattcttggcctgacctgtcaaccactttagcctccaaggtatctgagcctttctttcgcctctctacttagatcatattcttcctggattttggaatcaggctgggacacaagccacctcctcctccattctagctgtgtggctccaggcaagtggccacacctctttgagccactagttaactcagctgccaaacagggattatacatttacctcttggtgttgcaagaattaacaaggaggatatttgtaaatctccctgggagctggatggtgcttaataagcaggcattaagggttgattatctttgcactctctcctgccagattttgtaactgagtccaggcatctttagaaacagaaatggtccctgctcttctgtatcccctgggataacctagcatcatttcgctgggttacacatcctctcttctctcctgtatgtcgtccctctttcttacggtggttctaagctctatggatcacttgtcttctcctctgagcgggaactgggcaattggaggttctttcccctcccgtgctggtgggagaattgtttagtaggtcataaagtggaatctccattycagtctgatccggtcaattctggtaggacttcatccaagcacaaagaaacctttgttttcattcaagacttccctaaaaggtggctgggtgcggtgctcaggcctgtaatcccagcactttgagaggccgaggctggcagatcacgaggtcaggagttccagaccagactggccaacatggtgaaaccctgtctctactaaaaatacaaaaattagccaggtgtgttgtcacgtgactttaatcccagctgctcaggaggctgaggcaggagaattgcttgaaccctggtaggcagaggttgcagtgagccgatgtcatatcactgcactctagcctgggcgacagagtgagactctgtctcagaaaaaacaaaaaaaaaaaaaaaaaaaaaaaaaaggctttcctgaaaggtgattcacaggcctcttcggatcccttcgtgtttagcaatttggatttccacacagccttgctgtgccttctgcccatttgtcctctgctgctggtccctgggtgggacagctcccctttctccttgtctgggttgctcagatagagccataaggattctccctgcctcaagagctgacttccttccacgagttcctaaccacctgtccagttgattcttctctggacctgccttgacatctctgtgccaagcccagtgccggggttgcagatgcagaggcactggtgcatatttcttgagttgaagagcttgcaactgatgagccccttccactcagaaaaatgttgttcctggtcttgccactgcctggaacccaccaacacctcctctttccaatattgctggcttctacttgttctataagagccatgttctacaagttctgtattgtgtgtgagtccctctcaacaaaacaatttccctagtcatctcttatttatactccttgatgcagatttccattttactcttacctcattctatcataattatctatttgtgtgtgtatgtatgtccccactaggctgtgaggtctgtaaaaggatagtctaaatacagctatctattgcaaatcttataatgtgactccatgatgagatagttggatatagccttatgttcccagcaggaaggaagaaaggaaaggagggagggaggtaagggtgagagagagacaagaaaggaaaggaggaaggaaggacgggaaggagggaagaagagagtttggtcaacatttgttgattgtgaatgaacaaactaatgaacactaaatgaacaaatgaatgaatgaatggacaaatgaatgaatgtatgagtgggtcaagaacaagattcggccccaaggagatacgcgactttctactttgttttctatttggatttcacacaaaggctckaaggtctcctggtaggccatgctcagaagtctgggttgtcccctgcccaggacaggctcaccctggcctgtgtcctaggtattgtggggccgctgtaggaggatggtggttaaatcttggaggaaatccaggagtctcatgtccccttggcttctgtcagaaccagtacctctcatttattttgaggtcttggctgaagatgtatcatctacaaccctgcagatcagatgtgttagagcagagagagtggcgaggattaatctagactgaaatgtgctaatcaagctgtctcagatgccattttctggatagggaggaacagcagttggcgagtttaagagcaatatggaggaaccactggggattctatgcatgatcttaggggaagtagcattattatctccaacactggctgtttacattatcagaataagaatggttctccaaggccaggtgtggtggctcacgcctgtaatcctagcacttttggaggatgaggtgggtggatcacctgaagtcaggagttcaagaccagcctggccaacatggtgaaaccctgtctctactaaaatacaaaaattagccggacatgatggcaagtgcctgtaatctcagctactcaggaggctgagatgggagaatcgcttgaacccaggagatggtggttgcagtgagccaagatcgcaccactggactccggcctgggtggctgagaaagactcagtcttaaaaaacaaacaaacaaacaaacaaacaaacaaacaaacaaaaacttgtctccaaatgagcagacaccagaatctcatggagggatttttcgaacacgtagcacagggcttcgcccccagcatttttattttcgaacttctggagtgcagcccaaagatctgcatttctagcaagttcccagatgatgttgatgatgatgcctgtttgggtatcacattagatgaagggctttgctaatttcagctgcagagtattgactcatggggtaggattcctgccatctgcagcttctttgggtcatcactagggtagaatcttattttctgagtatgaaaagcatcaaagttattttagtaaaatgcttttgctgtcattgctttaaaactagctcttcgaagtgggaaaaccaaaagttttattgaagcaatttgttgtaaatatgagttctgtatcacatttgggaaatttgtaaagccttactttgaatgtctttttcttcactctatctgtattgtttggtgctttctatataaatttataaattggatgtacckccacagatgtcggttttctggtaataatacttttttacattaaaaaaaactcctgaaatgaaaatgtaacttagtcttattattgtaatctccccttgcctttttgcatggatcatttgtttgtgaactggttatttcaggaagggctcaaaggtaatttcatggtttatagcatttatattggcgccttcgatgagcaaaacatattgttttctaatacatgaaaccaggaattcatatatatatgtatatatattattattattattttcattttctaaaattacatgtagtacatgtatatcaacttcaagacattgagaacaaccatgtacagaaattatactctgtacacaggggaaatatgaaagttttgtaatgcaaaaaaataaaaaaaaatcaacatttgcaagcttatgagatgattttatttttaatgaatccaaatggtagcagggagctgctgttgtgtttgtgcattgtacagcaattcatatctaaaaataaagtaacatatggctttgttattatttagtttaggaattgatgcacctaaaggagttttgagagctctgggtctcgttcggttgttgtacatggcaaccaaataagagtagctggagcagagactttctcttcttcagattattaagatttgagcaattcattttttttggatggtgtttattaaagtmaagaaatcttttgcttatttgctaatgattctctcccctttctcttcttatatttttgaaggctgaattggtaaaattatctggcccaataaaaatatgtcctgggttggaaaagagcacaagtttctttttctagccctggagtgaggtggctctctggcctctgggttcgtttggtrtcctggggagtcattgacacccacacactcctagtcacaagacctttccctcccatccagattgtgtttattttacggctctcgcacggagcatgcagctgtgtaaacctgagaatggtttctgcacagctttgatctttgcatggatcaacagttgcccttagtccctgaaccctgttccatggccccatatttcttggatttttccattttctagtaattatggcatcatgtagggagccttccaacagcatcccccacagctttgggtggagaatttggaaaaaatgccttaagtctgccatttgtagaaccatattaagtagtgatttccatttgatgccaaaaaaatttgccatttagtttcttcctaagaggcaatctgacaatttcgagtagactgctggagtctgacaaatttgaatgtattatggactgaataaatgtttattgaacaaatgccatttttttaactcttaaaatgttcagttcttccaccaaacatagatgacacaactgttggagacggagcaccggactgatgcagtgtagcattattttgtaatctacgaactgggagcctatggagacctatgcatggtggaatacaaaagtcatgacctgtctttatatcctagtatgggcaataaaaccctccctttaatagccttaaacatggtacaaggaaactgtgcaggagttccagggaaggtgccatttttccatatggagttgatatggtctgactgtgtgtccccacccaaatctcatcttgaattctaattgtaatccccatgtgctagggggagggacctcgtgggaggtgattgaatcatggagaccgttcccccgtgctgtgagtgagttctcatgagatctgatggttttgtgcggggcttttccccactttgctctgtacttgtctgtttcttctccttcttgccaccaggtgaggaaggacatatttgcttctccttccatcatgaatgtaagttttctgaggcctctgcagccctgtagaactgtgaatcaattaaacctctttcctttataaaccacccagtcttgggtatttcttcttagcagcatgagaagggactaatacaggggtgatcacaaacagcctgcagactgggccatckttcttaggcaggatctcgagctaggagatgagaagagctctataggcaaaaagaatgacttggaaggccacatatggcagagtagctaagactttggggtttccagtttcagatagacatgggtttgtatcctggctctgcccctcaatgcctgtgtgatcctgggtagtttgcttaatccttatgagtcccggttttctcctgtaaattgggattaataatagtcacagctagctgggtgcagtggctcacacctgtaatccccgcagtttgggaggccgaggcgggcagatcacctgaggtcaggagttcgagaccagcctgaccaacatggagaaaccttgcctctactaaaaatataaaatttgccacgcttagtggcacatgcctgtaattccagctacttaggaggctgaggcaggagaatcgcttaaacctgggaggcggaggttgtggtgagccaagatcgcaccattgcactccagcctgggcaacaagagcgaaactctgtctcaaaaaaaaaaaaaaaaattatgtccttctagattgtgaggattaagcaagaccatgcatttacattgtttaacactgtccctgagacatagtaaggcctcagtaactgttagctctcttattgctaccggacaagtgttcttattttcccttttcttcttcttccttttcctgttccttgcccttcctctttcgaagaaagtttacgccaaaaaggatgagctgggttgcagccagcattctggtttcacaggagcctaggagatacatggagaatattctgaggctaggttaaatagtttgtctccagtgtgggtgttagtcatattcttatcagtatctgaagaacccagaagactgactctcagaacggaaaactcttggctagaggattccgaaagctagcgtgaagtggaggctattactcagtgggtgccgtaacatgtctgtgtcacctggcacctttttattctctaatctcaggagtgagtgcttcctcctgccgtgcctggccacttctcaccttcagagtctttggtatgcataaattcttcatcacttcagtagagtgaaccctgattacctacatttattaatgaaaacaaccaagaatagttgagcccaaaagtacaaatcaatgtgctgaatcagtttatgatgtctccctaatttctgcacatctgttgagctgtgatttcaaattccattccatttcttttcttttcttttcttttttttttttttggagacagtgtcttgctctgtcacccagcctggagtgcagtggcgagattggcaagatcgtagctcactgcagcctccacttcctaagctcaagtgatcctcccacctcagcctcccaagtagctgggactacaaggttgtgccaccatgcccgcctaattttttgtatatttagtagagatggggttttgccatgttgcccaggctgttctcgaactcctgggctcaagtgttgtgccctgtttggcctcccaaagtgctgggattacaggtgtcagttaccgcactggcctggaaatcctatttcttgtcaagcaggacatcaaagttgagatctaagaatttggactaaaatttggggcaggttgtttccactactgtgtattgagagatggcagggaccatcttgccgagtccaagagattgtgaagtctaaaaggcttggccgcagtgttggttcatctgtaacagctgcctacaagggaatctttgagaaatacagattgctgcatcttataagaaggacagtgcttaaaacagaaagaattgagtagaaattaagacatagcttgatttttttccaacagaatcatgaagtctgttcaattttctttttaaaaagtaatttaatcttctagaagatatctacgtttattcaataatttcctaaggtagtcttcaaaacctaggagcctaggagatacatggagaatattctgaggctaggttaaatagtttgtctccaatatgggtgttagtcatattgtcatccgtatctgaagaacccagaagagtgaccctcggaaaggaaaattcttggctagaggattccgaaagctagcgtgaagtggaggccgttactcagtgggtgccataacatgtctgtgtcacctgccacctttttattctctaatctcaggagtgagtgattcctcctgccatgcctgtcctccctccctccctccttccctctcccctctcccttctcccctcttctctttcccctgtctccttctctccctcccttccctctcttcctttcgcatctgacatctccaaatagtttttcatgcaatggcattactaatggcttgactttttcgggaaatgattcattactttatgatttcaattcagtaaccattttcagctatgccataaatttaaatcctttaccatcaagataacgtttttttctcctgtcactgaaatattatgattggaaactatttttaaaagttgactctgtttgggacagctcttagggatttgtcctttataccagcatataacttgtaggttgtcagtgtctccaggggccatatgttcaccacctagactcaacagttgctaatgttttgccatgttttgtcagttcatctatctgtccatctctttgtccatccatccaactacccacttacccatccatccatacrtttatccatccatctacccacccatccrtccatccatccatccatgcatccatccatccatccatcatccatccatgcatgtaagttgcagacatcaacaaactttacccttaaggactttggctggcatctcctaaaactaaaggcattgctgtacgtaatcacaactatcatcattatcatgtctatgaaattggtaataatttgctaacataaaataatacctagtccataacaagatttactgaattattcacaaattgtcttttatagctttttgttttcaatcaggctgtaaagttcacacattacatttggtattgtatcttattagtctgtttattaaagagtttttttcagggatcagggttagagggaaggctcctttctggatactgtgtatactactaattttctttatcggctaccaaggttttctttatttttttcatacttttctttcattgaggaaacttattgttttgtacattttgttgtacctttatgaatctggttttgacttctggcccagctaagaagctggtttcctttggtgaaacatgggagaagagggaggaaaaatctgttaattagaattgtgggcgtgcactctgtttatctctaacagaataggcttcccacggctctgagctggaaaggaagattcaagtctcaggttaaaaaacaaaccctccaagacctcagggctgtttgcctgtgattagagtctaagaaagactgagaattggaaatcaggactgtctctggtcactgatggttcaactacagcacagatgcactgggtaacagacacaccgccaggcctcaggattacgttacctagggttaggactgagcctttcttccaccttcttggggttggagggcaggaatttaacatatcttagatcacagagtaaggcctcttctacccataagtttggtttatacatcaaagtaacattctaaaattagatgagggtgttttttttttttttctttttgagacagggtctcactctgttgcccaggctggagtgcgatggcacaatctcagctgattgtaacctccacctcccgggttcaagcgattctcctgcctcagcctctctagcagctgggactacaggcgcctgccaccatgcccggctaacttttgtatttttagtagagaaggggtatcgccatgttggccaggctggtctcgaactcctgacctcaggtgatctgcctgccttggcctcccaaagtgctggggttacagatgtgagccactgtgcccggccttagatgaggtttgtagatgtgtttttcatattcccaaagccatgaaatttgacaggtaaatatatcagttataaaagttttagsattaattatcaactaactcccagaagttgcctcagcctctctttttcagccttgtcttgccccagcccagagacaagccacagctataggttttatttctgaaggagaaaactcagtggaccattccactgcctcaggagatattgcctacctgcagacatgttttgtcttatccacacatgatgtaaaaacaaaataaaaatgctgagagaaatgccaattcagaggtttcatataaaaatatagctttcccattagacttgaaaattggaagaggaggtaacaattggccagtgctgagtagagggcatgtggtctctactttgccacaatctccaccataccttattgtctcccttctcagtcgaagcagctttacacactcctgctacttgccaagacactgtacacatttaagtttgctacctgttacttggcatatctcttggttcctaagagttttaggtattatgcaatttgccagctccctcagcccctttcctggctccaaacctttggctttggtttgatgttactgggttgctgcaggaaatttccctgtggacctcactactttatcaactgtaatggtcttgttgaagacaaggcttagaacatcatcagacccagagcctttctcagaggacctgggagaactctccatatggattttcatttgggaagatagatgctcttattggaacagctggttttccctttaaaacagggagtccagcagcttctaggatgcttagaatcagaattgttgctcactttttaaggtatagagtakttgtcttattcttaactacattttatatctttgcccttttttcccctactttaaataaaatctatctctaatttatgttacttaagcaatgacaaattctttttctgatagacaaagtaaagtataaataaataagacatccaagtaataatcagaagtattttttatgttggtctcattgtggtctttttaatcccaggcctgatgcgctttaggtaccagccttggttgaagaggagcttgaacagcctacacagacatgaaacttgagcaactgagctcatggacgttgcttttaatcaggatccagaactagggagttgagtgagcttggatttgagctccacttttcaaattttcaccacctgtgctctttcgtttttgttttttgtttttgtttgttggttggttttttgtttttttgagatggtgtttcgctctcgttgcccagtctggagtgcaatggcacaatctcggctcactgcaacctccacctcccggtttcaagcgattctcatgcctcagactcctgagtagctgggattacaggcatgcgccaccatgcccagctaattgtgtatttttagtagaracgggatttctgcatgttggtcaggctggcctcaaactcccgacctgagatgattcacttggccttggcctcccaaagtgctgggattacaggtgtgagccaccgtgcccggccagacccgtgctctttctcccaccactgccctgtgccaaccaccacccccactcctattctggaaagagccaagccgtcagctattgcttttgaatctatacgcaattctagcagcttcttttagagcccttttaaattagcatgaaatagttttactagccctgaggtttcagccaaggagctttaaaggagccagccctttgtttacttatttttcctcttctgaacatttggaaacatagcttcggtgctccttctccaagaaacctgagtcatgacctccccaaagtgtttccttcccgtggcctcttctcccgatcagctgtttgttatctgagggattcgttaataaccaggacatctgattctcatcattactcatcctctgctcactctcctttctaatgcataggcctttagccttttactttctacctttttgaatgctatacttttttgtaaaattttaattaggttaatgcattgacattgttcaacattcaaacgatggaaagggtgagtgtggaggtttggtttccccactttttccagccatgctgttgccttctgcagaggcttctagaattttcagatgaatgagaatcctttcagaaatagtctctgcaaactccagcacacccatagtgctagggtgggtcttagtaaaatgtctgcagggtaagcacactgttttgcactccacacaattcacttcacaatatttcatagagactttttcatattaatatataaagagatatatacgcgtgctgcttcacgataatccattgcagagctggtctgtaatttattcaagcattctttgttgatggatgttagggttgtatccattattttgctattatgaacaacaccataatgggcaaccttgtacacatttcctgtcaacatgtatcactgaatggaaaggatctattcctagaaaggatccattcctagaagaggaattctgtacaatatggccaactttctctctgttgaggttgaaccatttgacacatytcgctagcattgggaaaatccccattttcctcactatccatttttcttcctctctttccttcctcttttcccttcttcctcttttttttcttttctttccttccctttttccttttctttccttctttccttgccatttaaaacatactgataacttggcagcacagggcagtgattaaactcaggcactcaycccaccctacctgggaatctgaattctgtcttttctgctgctgtggattctcagtccccaagttgtgtaaatcaaagcttctcctgccacactagtgtgtattaggccaggacttcatagtgtgattcaaatcaccaactgaatttttttttcctttycttcccctttctgggggactacgtttttcatggagaccggggccctccagctgctgtgatgatcctcccttgccagggaggtgctgttaatagcaaatgccaagtgagctggtgttctgtccctccggcctccttgctcacaatagccaggaggaaaaagccatgtaacctctggatgagtcccttggccatttagaagtgaaatgaacatccaagaagaagcatagacaatgtggaggaagaactcttccaaatgatggcagggatatttggaatctttccccctgagttccctctggaagttaaagcccagatcccgtgaactgattaaaaagcyscagaccattcccgttccagtcatcttgaaactgagcaagaccgtgtcatccatggagcttgaacataggagcactttaaaaaaaaaaagaatgaaaagcccctttcttgttttggtaatgatttaatgacagaaagtcacccacccaccacttgggtaccacgcagcccacattaaacaattagcccttgacagtggatagttcaagttagtttgaaatgagaaattgccggtgacctgaaacccatcattattaaccttgtggcacaacattgccataaccagtagccaactctcattttttctttttcttttttttggttggaagaaaggctcattgaggaaagttggctcagttcttttttgagtgaagtggtcagaccaccaagaattactttcctttgattgggaacaggttctaatacagatgtcctttacatgggcaatccacttttctcattgattccacaatcaattcgagctgtgtttatatatagacacctgcccacagagaccatgtggagaagcatttgcgtctcgctgcctgtcttccaaaggatttgccttctagtaattcatgtttttatagcttaactacatttatagtgaacgggtggcttcttcatccaaagaaagaacaaatgacaaaaagaaaaattttgatgatttgggaaccgcatttatggaataataacattcatgatacctctggataatgacaataattacagtatacgattctagaagggtgagtctagctgttcccagtgtgtttccatgggttgttatgtgttactggtcaggcgatcagggatttgctgaagattttctttcccatgtggcagtagatatttcagaaccctgcatcatggtgtccacagaagtccccagagttgtatgagagttcatctgggcacctttcccaaaggcaggccccctgtgcagcttcaactattcactctatttataatgttgttcctggatattgggcttgcttccacttgtggccaggagaggatatttcttactccagatcaaagagttgagacattgccttcccacaattcccagtgagcccaactccttaccacaattcccaccccatgccttccccaaattcctgatgagccctatgccttcccacaattccctgtraattttgctccttcccacaaccccagtgagccccactctgtcccataattccctgtaaatctcactccttcccacaatccccactgagtcccattccttcccacaattccctgtaaatctcactccttcccacaatccccactgagccccactccttcccacaattcccagtgaaccccacttgtgtagtgtgtctgtgagtagtctgcccactctccttatgacaggtttccagtattatctgtttcmtaacccatttccaaccttctgggttttttccttcaacgttttcctgtgacagttctccattatatctttgttagataatagttagcaacccattaataacttccaactttttgagcctctaccatatcttgttttcactgggatttctacaccgtggctactttgtgggacctgacttatcaagaacttaagcagcatctgttagaaaaggtattttttttatgaagtaagtagggaactaactacctgttcactgctgcccgttcattgctagcacaatgccaagtgtcaaataaatgyttcttgaacaagtgaatagagtacgcttctaggcttctggaaacggtgaatgttgctttatgtggcaaaaagggactttggagatgtgatcaagttcaggatcttgaaatggggagatgaacctgaattaccgaagtgggccctaagtacaattataagtgttcttatgagagggaggcagaggggactgtgactacgaaagaggaggaaacagggagaagaggtgaagcaggtgtgaggcaacaatctggtggcttctagcccctgaaagaggtgagaaatggattatcatttggaggattcagaaggaaccagctgtgctgacaccttgatttttttaacccagtgaggttgattttgggcttttgacgtccagaatgataagagaataaatgtgttgttttaagacctaagatcatggttatttgttagagcagtgatcagaaactcatacaagtatgaatgctaagagtaaaggcacctgcctcccacatactggacccttaatattccttttcatgggaggttttgcagattgctgccctccttgctctccttactcttctccttttactgaaaagatatttactagatgtctagcatgttaaagactgtaccttaaaaaaaaatcacactctaatttagcacagtttcaattgtggttaagcaccatgccattcacacttcagaaccaagctcagatccatgtgtgacactctggaatgtggcagctgatggaggaagggggctgaagttgaatctgcactagttgagttaaccttcccatggtgcctgcactagcagggactggactgagaccccagctttcccagtcaggccttcatttttctctcatggtgagagctttggaaataggcagtgcagtgtgggagtccttcccctagcatgttagtggccagcaccatgccacacagccacccagagctgcaagagagtctgcagaggtgattgccccttgctaggtgagtgtaaaccaaaaataaattctaagctccccaagcaactgaatggatccctgcctctgggccaaggggattccgaaataaacctgaaaaactagttcaggcagtgatgggaagagggggttggatatgactcattatacccttctttttttggaattcagtcacaactgaacagcattagcattaaaacagatcctaaggctgacaaaacagactctttatagcaataagataccaaatttcaaccctactctagtataggatcactttgcagatagcaggcatggaaagaaatcaaattattttaccccaaaatatatttctctggtatatttcgaaatggccctgcaaagctgtttcttgtctacattctgtagagaacatccttccctttccaggtcttttcctgatccaggagagattcactaggagtctggcacctttttagttttgataagagatatttaccatttattctctctgaggcctatttcctggaggcttcatctgcatcataagaaccttggtctttttgtggacttatcttaacccagatagtcctttctactgatgccaggtgtttagctaataacacttttaaccaattgccaatcagaagatccttgaatctacctgatacggtttggccgcatcgccacccaaaatcagacagtcctatctgttgatctcgggtgtttagctaataactcctttaaccaatttccaatcacagaatgcttgaatccatgtgatatggtttggctacatccccacccaaaatcagtcctttctattgatctcaggtgtttagttaataactcttgtaaccaattaccaatctgaaaatccttgaatccacctgatatggtttggctgcatccccaccccaaatctcatcttgaattgtaatccccacaatccccacatgtcaagggagagaccaggtggatgtaattgaatcatatactcccgatagtgagttctcacgtgatccgatggttataaataagtgtttggtagtttctctgcgttcattctgcttcctgccgctttgtgaacctggtgctttgcttccactctgccctgattataagtttcttgaggcctccccagccatgctgaactgtgagtaaattaaacatcttgcctttataaattacccagtttcaggcagttcttggtagcaatgtgagaatgggctaatataccacgtatgacttggaagccctcatccccatcactttgagttgtccttcctttatggaccaaaccaatgtactccttacatatattgatagaagtgtgcctgtaacttttttcccctaaagtgtataaaatcaaggtgtaacccagccaccttgggcacacgttcccaggaccccttgagactgtcttaggctttgttcactcttgtttgggtcgggaataaacttctttaaatattttagagtttcactctttcaatcaacgtacgtgactacccagaattaaactggaatgctgttaataagagaaatgaaaggatgatgggagatgtgcacccagcaatgtctgtcttgtggtcctgaagtctaactctaatcctggctccactatctggaccatgacaggttgtttaattgttctagttagagtgttctcctatgtaaatagggataataattggatgtatggcaggatttgggggaggattaaattaggttatatgcgtgaagttcgtagagccagggtctgggcattaatacgcatttagttactgtcgctcctgtgatctgcacaattattgtcattattttcccttcctcctccttccccctccttccccctctctttttccttttctttctatcatcatccatagctctcttgccccattgttttaaacccatctgtttttgtttctggtaactgtatccaaaagtaatacagaattttccgtaagaacatttattgtgtttccttctacccacgaattktcttatgctacacacacaacccactgaaatttcacctctattgtatgtggcttttctagaaacgtgtgcttctgggctttgtctcacacctcctggccagtgtttggcatgtgctcacacatgcacgcacacacagcctgcactatgtttgttgactgaatgaattaatatttcacagaataacaaacacatgctgattatactccttgggaagctaatttgttttcagctctgagagcaaggccaaatcaccagattgatgcctttggctgtgtatctaaaggacgtgccattgcagctaagtggacctgaatgtacagtaagacytagtggtcaccagaatgcatgccaccccggtgcttctgcatgcaaagggtgcgggccatgtgccagtcacagtggaaaaggcatgcttcgtgtcagcacatttggcatctctctgggatcggggatttataccccaaaaccttgctctagagatttggcttccattagcaagggtaaggcttgtaagaaaggagttttactcacctttgcttgctctcacagctgtgtcagcccattttcatctcttttcaatgttttaagccctgagagaacccagttcaattcccagcaagaaatgagcctctgtaacgcagccccagacccaccttcgagggtaggggcacccttgttgtcacgatgtacaggagccaggcttggcatcggagtggatgcttgggaagccccagagaaatagacgagtgagtgcaagagccagctgcctgcgtggcttagaggaagatttcaaacacctagtgcactgaaagtctgacttaatttgtgatttgtgaatagtctcccagaagctatggggtacagatgtgggacttgtgaaaaataccagacatcctgtgggttaaagaaaaagaaaggggggcggtgggtgaagtgtgagcaatttctggcagctttgtgggcatttattatgtctaggtggcacagtgtggttggactggttggtttcctatcagttgcattccctgtatgtcttcagccaatttttttggtaatccaaggcctgatgtatataaacaaattcctttcttgatcatctaagcaatgaacacttaacagagtcaagcttggagaattcagttcctaccacaaggtccggaatggaggatttataactgggagacagaaggtatgctgaaaggtactcaaactgtcacttccttcacccccaggagcactgaagcagacactgattcctctgcagttgttgggcttttgagctacttccctcctggggagatgcgtgttaactgtttmatgactggcaatgccgtaacagtgagcaagcaatgtgaccttacaaatacatgtgcagaaatgcagatgagtgggcctaaagaatccagactcaacttacttctagtggtaatggctgtaggagagatggggagtaggagaagaaaagccaaaggcagactttagtctggtttataatgctttaatatttttttgaaggaagaaaaatgttcattacttaacgtaataattatttttaaaaagcagcctggsgggggggtattcatttttctgtggctgccataacaaagttcttcaaacttagtgtcttgagacaagacatttattttcttaaagttctggaggtcagaggtctgacacaggcctccctgggctaaaatccaggtgtcttcagagctgtgttcttttggatactgtagaggagaatacatttcctggccttttccacgttacagagactgcccatgttcctcgatccatggctccttttcggtcaccttccagccagcaacattgggctgactccttcaatggccatgtctctggttctttgtcttttgcctcctcctcttacttttaaggacccttgtcatttcattggtctcagctggatagctatcaagggtcactttaaggtcagctgactagcaaacctaattctatctgcaaccttaattcatataacctggcgtagtctcgattttattttaattttttaattgaattcagctttacagtatcttttgtagggggtaattttagcttctttctccgttgaaaacttcaagtaaggaaacacttayattgctagtgagtggccagctggagttgtaggtctaattctttttttttttttaagacggagttgtgctcttgtcacctaggctggagtgcaatggcatgatttctgctcactgcaacctccacctcctgkgttcaagcagttctgcctcagcctcctgagtagctgggattacaggtgcctgccaccatrcccagctaacttttgaatttttagtagagatggggtttcaccacgttggctaggctggtgtcgaactcctgacctgaggtgatccacctaccttggcctcccaaagtgctgagattacaggcatgagccactgtgcctggctggttgtaggcctaattctagcaatctcagcaactgtaggatttctctgcattggaggaagcaagactgaaggtcgtctggctttatggacaatgtgcttagaagttcatgccataccttaggtccagtcttgtgactgaaccaaccagacaggcctaggctctgccctaagtggtcagcctccgaggtggtagcacgcagggcctcacttcccactgcctctgtctatgggcatgtgctgtgtgccattctctccccttatcagtgggttcccagctgcctggtgtacaggagggttaagtagatacctgttgagtgattgtgaatrttttcattcacgggggcagatttgtgtcctactaacaccagacatgtcctgttttcagattacttctttttcaacatctgagtacctataacatctaaagaataacaggaaaatccacctgggtggccaaagtcaatgtaatgggcagaaagggcatgtggtagacttggaaatcagacatcttagactccaacacagggctcttccacttgctagccatggaacctcagactgggatccttgacttccttatctataaaatatggcttataactcaccctgtattatagatctgctgggaacatgatagaacgtctgaacagtgctggcttatagcaagtgttcagagatgtgtttcgttgtttttcttttttctttttttgagatggagtttcactcttgttgcccaggctggagtacagtggtacgatcttagctcaccacaagctctgcctcccgtttaaagcaattctcctgccttggcccctggagtagctgagattacaggcatgtgccaccacacccagctaatttttgtgtttttagtagagacggggtttctccatgttggtcaggctggcctcaaactcctgacctcaggtgatctgcctgccttggcctcccaaggtgttgggattacgggcatgagccactgcgtcaggcctattgtttttcctacgtaccgtgattgcttgctttcttctctgtcgatgtccctgccatctaaatgctgagtccccttgtctacattttgaggctcttctattatggaagagggctagagaggccatcagaatttggtttcactagcctttgatccttcctgtttaaggagctcarcatttagcttcacttccctgtcattcatcagaattcattctcagattggaattgtccagtcttagagtgatttttgtccccagtgacacttcccttatatccgtgctgacacaggttcaggagaccaggtcgagtcgaaatcctggctgttccgctttctaacaagctgcttcatctttctgtgcctcacacatctataaaatggagctgggcatctgtctccttcagttatggtgagaattaaaataaaaaacacaaagcacttctaagaaagtacaggagaggccgggcacgatggctgacgcctggaatcccagcactttgggaggcagaggctggcagatcacgaggtcaggagatggagaccatcctggctaacacagtgaaaccccgtctctactaaaaatacaaaaaaaattagccaggcatggtggtgggcctgtagtctcagctactcgggaggctgaggcaggagaatggtgtgaaccnnnnnnnnnnnnnnnnnnnnnnnnnnnnnnnnnnnnnnnnnnnnnnnnnnnnnnnnnnnnnnnnnnnnnnnnnnnnnnnnnnnnnnnnnnnnnnnnnnnnnnnnnnnnnnnnnnnnnnnnnnnnnnnnnnnnnnnnnnnnnnnnnnnnnnnnnnnnnnnnnnnnnnnnnnnnnnnnnnnnnnnnnnnnnnnnnnnnnnnnnnnnnnnnnnnnnnnnnnnnnnnnnnnncagcccccttagtagctgggactacaggcacaccccaccctgcaggggttttttttttttgtttttttgtttttttgtttttttttttgtattttcagtagagacagggtttcttcatgttggcctggttggtctcaatgtcctgaccttaggcaagccacccgccttggcctcccaaagtgctgggattacaggcatgagccatcacgcctggtgaatggtgtcattttgatgtactgagccatctcagtttttccagcaaccttccctcacctttgtgstcagctagaaggtcagttaacacatgggatgggaattcttgccaatgtccttcgtaaaagaagaacttctccttcactcacatgtcctgatacttcctcagcatttcattctagcctttctgtctccatccaccatctatcaatcatctatcatctagctatctatcgatttctcttttttggctttaattttgtcactttttcttctgtctgctatagaaatagcaaattttcttatgtaagaaaactctgaacgcgaggccaaagtagaattttccctgaaacagctaccttttccttgaaattgttctatatctaaaatcactaggtgaggagtaatagaaatgtagacatgagaagtgaaactgttttttttccttgtaaaagcttcattgtgccctttagaggataactctgtagtttgatatgataaaaataattatatgattatgctgagtgaggtggctcaagcctgtaatcccagcacttggggaggccaaggccggcggatcacttgaggttaggagttcgagaccagcccggccaacatggtgagacccccatctctgctacagatataaaaattggctgggcatggtggggtgcagctgtaatcccagctgctcaggaggctgaggcaggcgaatcgcttgaacccsggaagcagaggttgtagtgagctgagatcatgccactgtactccagcctgggtgacagagcaagactgtctcaaaaargaataaaaatgaataaaaattatgtgattagagaggggaaaacaatcatttcttgtgcgctaatgccactcagcaggtgcttacactgtctggttcatccttacaatgactccatgttatcgccattttcagatgggtaactcaggtagaaatatgattccattagtttaaaaaaaaatacatagaagataagaaaaatcaccaaaaattcccagccacagtagatgtatctgtatttaactactctcctcgtgttgaatatttatcaggtttctcgttttcttttgtttttgttgtaagtggcactgcaggccagttgcggtcactcaaacctgtaatcccagcactttgggaggctgaggtgggcggatcacttgaggtcaggagtttaagattagcctggcccacatggtgaaaccctgtctctactgaaaataaaaaaaaaatcaggcatgttagcatgcacctgtggtcccagctacttgggaggctgggtcaggagaatcgccttgaacctgggaggtggaggttgcattcagtcgagaccatgctagtgtactccagtctgggcaacagagccacatctccaaaaaggtggcactgcagcaaacagcatccacatgtgtgcacagaatattgttctgttgtgtacctcagatggctttgttaggttagattccctgaagtggaatggccagggaatttaaaaagggttttgctcttgtcacctgggctggggtgcaatggcgtgatcttggctcactgcaacctccgacccccctgggttcaagcgattctcctgcctcaggctcctgagtagctgggattacaggtgcctgccactatgcctgggtaattttggtatttttaatagagatgtggttttgcggtgttggccaggctgttctaaaactcctggcctcaggtgttctgcccgtctcggcctcccaaagtgctgggattataggcctgagccacggtgcctggccaagtctgttttttaaatctggaaaatgggacttgttaacttctgtattgtcttttctgctgctttatccaactttgcaatctataagcttctgttactggaaaatggtgatggtaaagtaattgctttcytatgttccatcacagagggtagactgctagctctagtatttttcaatgctgctttttaagtgatagatgtataccattcagtaccaaccctgcaccctgggacatgcctccttgctgaaactaccatttatctttgtgaattcattattcgtttttccaacaaacttttattgaacatctaataagacctggacatttggctgaatgctggaagtgcaaagatgaaggaaagttgctttttggaaggatattagaatccaaaggtgaagcctgcacagtaagtaggccagtggtgggataagggatccattggcccaggaaattggagggacttggagaaggaccatctcacccgtccaaagaatggaggagtaagggaaggcttctggaaagaagttgtgttgaggctgtgtttggaaaggtgaataggagttaggccagtgaggaatggggtgaacaactgcaggaacttgagtgatactttggggtgaattctctctctctctctgtctgtctctctctgtctctgtttctgtctctctcactcacattttaggtaaagcagtgtttcttccccaggggtgattgtgtttgttacagtgtgatggagactggatactgcatctagcagatagatgctgtcaatcatcctacaatgtgcaggaccgtgcccacacaaagaatgacccgtccccaaatgtcaacagtattcaggctgagaaaccatgtactaaggcacaggacaagcatcgggttggataatggcagagaaaagtaccttacctccttccagaacctgagagtgtgtgactgtgagtgtgtgtgtgtgtgcacacacttgcgtaaagtgagaaaaatctggtgttttttcgaagtctgcctcgtttaggctctggactcctgctctctgttgactctgtccagagagtaagcgactcagcaggtgtgcctccccatgggcccccttcacggtgtcctcaccttgatttattagagcattttattcccccaacagtgtttatgacatccaaggacttggtggaaccatgaggaaatgagagtggacagtgagactactatcattcattttcactccccgtaaacatcttctgtttctgttttagaagacattgctaatcccctcatgcactggctttgcgaatttctttttcagcctgggtttgaaagcaaagtggtagtgactttttcctgatagctgctgaaaaggttccacagtatttggaccgctgcctgcttctaccctggagcacaaaagatccaggcgtagaaattggttctaacaatatccttttagagaacaccaaggggatgtgagtcactttccctttgatttaaaggcactgcgtccctcaaattcagagttagagggtgacatgtagttgatctttacttcccgggggcagaggaccataattaaatggctgtggaaacccagaagcagcctacagaaactcttaggagccctccgtctgggaggaattttttttttttttttttttggtatatctgtgtttacagttctagaaaagtgttggttttgagggcaatggagacaggaatgaggagaaaatgtataaaggagaggttgctgtgagccgagattgcgtcactgcacttcagcctgggcgacaagagcgcaattctgtcaaaaataatattattctgttgtttcctaattgttgatttgtggtccatatatttggttccttaactaaattggagttcttaaaacaaatgttaagaacacaacatttaggcacacagtacttggattccagtagctttggataaattaataaaatccttccattttctcagttgtagaatgggaatagtacccaccttataggcttgctgtggggagtaagtgggataataaatgttaagtgcttttagctgtactgtacatacataatttctgtaagtactggctattttaaaaattattttaacactattctgatataggaagttaaaaaatagcacagaggggatccctgtgatttttactcacttttctacaagcatgactccttatataactacagtacaggatccaaaccaggaaayatgcctgggtacaatgtgagtgtataattccaggtaggtaaaataatggcccttattaggatgtctgcgtcctaatccgcggaaactatggatatgctttgttacatggaagaggaaaattaagattgcagatgaaattcaagttactgatcctgcgaagttaaaatcaggagattacccagggttatctggttgggcacagtgtaattgccaggattcctaaaagggggagagagagtcggatgagtcaggcagtgagatggcagcatgagaaggacaccgccacacattgctggctttgaaaatggagggaggcgggcatgagccacagaaagtaggcagcctctagaaggtggaaaaggcaatgagatggattctaccgtagagctaccagaagggaacacaccttgctgatgtcgttttactattttcttatttatttttgagacagggttttgctctcgcccaagctggagtgcagtggcgctatcatggctcactgcgatcctcccacctcaacctcctaagtagctgggactacagtgtgtaccatcacgcccggctaacttttttgtatttttagtagaggtggggtttcatcatgttgcccaggctggtctcaaacccctgggctcaagcggtcctccctccttggcctcccaatctgctgagattacaggaccctgctgatgtcttaatcttagccccttcagatcccagttggtcttctgactccagagctataaaagaataaatgtgtgttatttcaagccgtgaatttcttattaatgtgtcacatagcaatggaaaaataaacgttctatgccatttttatcacatgcgtaggttcatttaaccaccgccactactaaaatacaggactgttccatctgcaccgaggtctctctgtgctaccccttgaagtcacacttgccaccctccgcccttagcctttctttcagcctgtgaggaagcaaaacttttactcttcaggcatcacctcacgcgtcttttctgcctgggaggcactttttccagttttcctggcgaaatagtcatcttttaagttctctgacaacccctctctgagcatctaatcccaatcagaattccctcctaatgtaaactctcattatatcttttaactttatttcttagcacttatcatgctgtatggataatggtatatttgggtgagagtatttgtttctctttctccctaagtaggctggaaactgcatgagggcaaaaacttagctttactcaatgttttctcagcttcatgtacgtgactgtatacagagtctgagccgagaaaaccttccttgcatgtacgagcaaatgagagtattcaaggtacagaactgaaattttctctgggtttttaagtggaagagtacacaagcattataagcaattttacctgcatttactcaacagacttttgttttttatccccttcggtgtaggttgtcatactaaattggttcagattctgtatctgggggtagttagacttctgtgaactccaagtagacggttgaacatgactgaacttgcacagtggacacattgtgcatttgtttttaagtccctagctgtttccagaaatagtttggttaattcatactgataaaataaatccccgtaagagcattattccccaaagtgggcttcctttgccaaacctaattatctggagaaggtattgaagaagtcaacttacctcttggccaaatgctttctagaattattcaaccaaagacagcaggctgcacctaggggaagccaaacatctggatgaagaatgaaatatccagatgttttcaagtatctggatgtttctaaccatctgtttctcttggttattgacaaatgatccagctgttttgcagaagatggtataccttgcctaacagaagagagaagtaacattcttagaaaactttgacatcatctcatctgtactaacacaggatttctgtctttaattgaagccatgacttgatcacaaaaatgaaaatagcttcatgtgtttctgaagctgttgtcttgctttgggcgccagactgcacaggattttaggttaattgtcttgtttacaattagagtctgcattgtttgtagcttgattctatttataatgtactcacaccttaaccaatagcctcacagatggcatatgagaatactcatactcagtgctgctaaaaacagcctgctgcctgaacaccagagtgtcttttaaagcgtagaaaagttgggtacataaaatttctgttgcaaaaaggaatgtataggccttaattgaaaatgtatctttctggaacaggagttttagaagctgagtaccacccactcccttgctccacaattctcttttgtttaaggcaacacgtaggttcttagttttttaaatatatatatatatacgtatatatatacgtatatatatgcgtatatatatacgtatatatgcgtatatatatacgtatatatgcgtatatatatacgtatatatacgtatatatgcgtatatatatacgtatatatacgtatatatatatgtgtgtatatatatatataaaaatatatttaaataatgttaaggctagagtagaatgacatcatgggaaggcttattgaaacttggagtggattcgtagtctgccacgagaatccttgtctgatgtttgtgggtgtgtaggactgaatttgaagtccttaaatggatgtcctaacagtgaataaagacgtggggcttgaatttatgtattatcttattactctgtcattttcttgagtggtacaccagagtgcatggaaaagtaaatgattggaagccgcgtggtagttaagggtgatgatgtaggagtgagaacacaggcttggtgcctggcgtcagcacacacatcacaggccctccctgtcagtggctgtcgtctgttagtgtttccagcacagctctaaagagcgacgcttggaggctggggagagggggatggagaggcatatgattctgttgacatttagtgacatgcgctcttcccaaccaaacagatgcaaatggattttagttgtgagtggttgtttaacacctgcataagtgacagacctgcagagacaggttgtggatggaacgcaaaattcaaatcagtgcatgagaacagcagctaaagtggacagacccaaatgttttgcctaaatatttggctcctagttgtacaaaaagccaaatggtttcaatttcatcctatataaaccagatgattgtgtatttacttctcacttgccctgccagggggatggttggtggggggaagacaaggacaaacaattcgaaagagcaaatgagccaaaatccatctggattttgttaatgctgattatatagtttcttctgttgtttttaatgtcttccaagccttctgtgtattagccagcattaaggggaaaaaatgacattttgactttgactccctttgtaatgtaatgcattgttatgtatttctgaagtttttcttaaggaaatagtatatgataataatgactagcactcactgagtgttcgtgatcaccaggatcaggccaaaggttttcacgcttgtgccttttaaactctcaacaacccagtgagannnnnnnnnnnnnnnnnnnnnnnnnnnnnnnnnnnnnnnnnnnnnnnnnnnnnnnnnnnnnnnnnnnnnnnnnnnnnnnnnnnnnnnnnnnnnnnnnnnnnnnnnnnnnnnnnnnnnnnnnnnnnnnnnnnnnnnnnnnnnnnnnnnnnnnnnnnnnnnnnnnnnnnnnnnnnnnnnnnnnnnnnnnnnnnnnnnnnnnnnnnnnnnnnnnnnnnnnnnnnnnnnnnnnnnnnnnnnnnnnnnnnnnnnnnnnnnnnnnnnnnnnnnnnnnnnnnnnnnnnnnnnnnnnnnnnnnnnnnnnnnnnnnnnnnnnnnnnnnnnnnnnnnnnnnnnnntatgggagtgtttcaattaaaattatgtatggacatggaaacttgaactttttatgattttcatgatcacaacttactctgatctctttcaaccatttaaaaatatgaaaaccattcttagtttacaagccctacaaacactggcattgggttaggtttggatgatgggccattgcactccagcctgggtgacagaatgagactctgtctcaaaaagaagaaaataaaacaggcgttccttacctacagcctgctatgatttggggttcttgtatttttttttgtttgtttgtttgagacggagtcttgctctgttgcccaggctggagtacagtggcacgatctcagctcactacatctctgcctcccgggttcacgccattctcctgcctcagcctcctgagtaggtgggactacaggcmcccgccaccatgcccggctaatttttttatttttagtagaaacggggtttcaccatgttagccaggatggtctcgatctcctgacctcatgatctgtcagcctcagcctcctaaagtgctgggattacaggcgtgagccactgygcccggccggggatcttgtattaatartagggagacagtaagcaagcaaggctcagttaatgataaattgttatcaggagacccagcagtttctgctttttctaccctcctctttgasctctatttaaactaataggttactgggtttsaacatgccatgcagtgggaagaggcgggaaccccactgagctgtcctctaagtgaatcatgcccactatttggttgtgaggctgtggactttacttttcacgcatggcattgaaagaacagggaagggtggattccccatctcctcttcctctttggaatcaggaaaacatgtttctattctaaatgttctttgataaataagattgcatgttcctggctcctgtaacatatattttctttttcctttgtccggcatacttgactaattgtagagctttttgagcctaaaactggataggaacccagtgcatgcactcttaaggactcagaggcctgctcaaggttaagtgcagtatggtctgaataataagcatagatgcccctttactgagcagcagctgggtgctgggcactgtgctaggcatttttggatgcattttcctcctccaacttcactttcccctatgagattatttcctctgtgttagagacaagaaaaatcaatttacaggtagtttaagtgacttgttcaaggctacagtaagcttgaagtggcaaggatgggatttgaacgtctgtctgcttgattccaagaccgtggcctttgtcattcaggtcatgctgctttcctcaaggcaaggaactgaggttttctgttggcagtgaggtggtggcttcttgtttccctggtcttagatactgctcaactcacagttgaaatgtagaagtgaaaagtcagacagcagcaggtgttgctgggaatgtggagaagttggaaccctcacacaccattggtggggatgtaaaatggtacagctaacttggaaaacagtcggcggttcctccaatagtcaagagttcccatatgacctagcaattccactcctaggtacgtatcaaagagaaatgaaaacatggaccaagacttgtacatgaatgttaatagctgcattgttcttaatagccaataggtggaaaaaaccctaatgtccatcaatggacaaatggataaatatgttgtggtaaatgcgtgtaatggaatattccattttatattcataaaaatggacaaagtcctgaggcattctataatgtgagtgaacctggtaaacatgaggctaagtgaaagaagttagttacaaaagtccacatatggtgagattccgttctgtgatatgtccagaacagagaaatttagagatagaaaatagatgagtgatgactcagggctgggggagttgggggtgggcgggataggaggggtagagggtgaaggtgatgaaaatgttttgcaattgtctgtgttggttgcacaactctaaatgtactaaaaatcattgaattatacaattttaaatgggtgaatcgtatggtatgtcaattatatctcaataaagctgttaaaaaatctgaaagtgtcaattaatctttgctcccagagaaaaccactcagggcccgagctgctcatgggcacaaaaacccattcctcagattccttggccatgctggaagcctggcttgtgtgagagcctcaagtctctgtaacagcctgggagtgttggtcccgtcacagggctgtggcagcctttaaagctagaaggcactgctcagaggaactggttcctttgaatccttttccgtcaccatgcaaatgtttacaagctctaatcaggagaaatgaaaaatcacatgtctaattttaaatatgttgcctctgatcacaggtgttgttaaaacagctcttttatgactttataaatactcagatttattttgaagcaatgtttcattattcctatactatgattaaatattgagactattgcttttccaattgttctattgcagtatttaatgagtgcaattaaatggaaaaattgcctttttaactggtgatagtccattagtgtctctgtctcttcaggaaagaaaagaagtgaattattagaatgacaaatgaggcaaagttaccaccgtgatggagaggtgcgatttccctccacataatcttcagttagtgatctctgtaagagaatgtttttcaaaaggctaatagagaagtaatgagatcagaaggaggycaacccggccttctccgtttggcagcttgattaatttatttctccttcttggagattgctgcaaggggcttttgtcaccctgtgtttttcatgggactgtaacctgagtgactgctgatatattagccttgcaggcaaggaagcaagtccgttgccctggaatggaaggcataggagttaagggtttgtttgcttttgcaacttgaacacactcattgggagctttggataatgacaacaatgatgatgattttaagagttaatcaaattaaaggctatgaaatgatgcccactgtggatcctgtgcctggtgctcagcacatacaacatcatttcattttcacagcccttgtgacatgatagggctcttttgcagatgaggaaatgcaggctcagagttatctagcattgtacccttaagcagaagggggaggtaggagtgaatctctgtctgcctctaaactcttgagctcccctccagaagtccagggctcttagaaactttgtactcaaccattaaattgttgccattgtgctgaggagcaaggaaactgggatcacacagctagatcacagtgggggaacctgaattatggggatgctcacaaaagggcaaaacacaacggttgctgtcatttgatgctttatgttaagtrtgcatatgctcagttrcagaaacctaaattgctaaattgcaaggctgtatatgatatgccaatttggcatattctgtctttttatattctgccacccctatcatacttatgaaaatgccaggttgtaatcattcactgggagaaacaaggggttgaacattgttatcgcacaaaggaagctgggcctagtaaaggaatgtaaatactaaaatgccagcatcactgttacttactgtgtttatactggatgtattacttaacctctctggctttatttctgcccgccctccccccgccccccccccgcaatgcctcaatctgtggcagnnnnnnnnnnnnnnnnnnnnnnnnnnnnnnnnnnnnnnnnnnnnnnnnnnnnnnnnnnnnnnnnnnnnnnnnnnnnnnnnnnnnnnnnnnnnnnnnnnnnnnnnnnnnnnnnnnnnnnnnnnnnnnnnnnnnnnnnnnnnnnnnnnnnnnnnnnnnnnnnnnnnnnnnnnnnnnnnnnnnnnnnnnnnnnnnnnnnnnnnnnnnnnnnnnnnnnnnnnnnnnnnnnnnnnnnnnnnnnnnnnnnnnnnnnnnnnnnnnnnnnnnnnnnnnnnnnnnnnnnnnnnnnnnnnnnnnnnnnnnnnnnnnnnnnnnnnnnnnnnnnnnnnnnnnnnnnnnnnnnnnnnnnnnnnnnnnnnnnnnnnnnnnnnnnnnnnnnnnnnnnnnnnnnnnnnnnnnnnnnnnnnnnnnnnnnnnnnnnnnnnnnnnnnnnnnnnnnnnnnnnnnnnnnnnnnnnnnnnnnnnnnnnnnnnnnnnnnnnnnnnnnnnnnnnnnnnnnnnnnnnnnnnnnnnnnnnnnnnnnnnnnnnnnnnnnnnnnnnnnnnnnnnnnnnnnnnnnnnnnnnnnnnnnnnnnnnnnnnnnnnnnnnnnnnnnnnnnnnnnnnnnnnnnnnnnnnnnnnnnnnnnnnnnnnnnnnnnnnnnnnnnnnnnnnnnnnnnnnnnnnnnnnnnnnnnnnnnnnnnnnnnnnnnnnnnnnnnnnnnnnnnnnnnnnnnnnnnnnnnnnnnnnnnnnnnnnnnnnnnnnnnnnnnnnnnnnnnnnnnnnnnnnnnnnnnnnnnnnnnnnnnnnnnnnnnnnnnnnnnnnnnnnnnnnnnnnnnnnnnnnnnnnnnnnnnnnnnnnnnnnnnnnnnnnnnnnnnnnnnnnnnnnnnnnnnnnnnnnnnnnnnnnnnnnnnnnnnnnnnnnnnnnnnnnnnnnnnnnnnnnnnnnnnnnnnnnnnnnnnnnnnnnnnnnnnnnnnnnnnnnnnnnnnnnnnnnnnnnnnnnnnnnnnnnnnnnnnnnnnnnnnnnnnnnnnnnnnnnnnnnnnnnnnnnnnnnnnnnnnnnnnnnnnnnnnnnnnnnnnnnnnnnnnnnnnnnnnnnnnnnnnnnnnnnnnnnnnnnnnnnnnnnnnnnnnnnnnnnnnnnnnnnnnnnnnnnnnnnnnnnnnnnnnnnnnnnnnnnnnnnnnnnnnnnnnnnnnnnnnnnnnnnnnnnnnnnnnnnnnnnnnnnnnnnnnnnnnnnnnnnnnnnnnnnnnnnnnnnnnnnnnnnnnnnnnnnnnnnnnnnnnnnnnnnnnnnnnnnnnnnnnnnnnnnnnnnnnnnnnnnnnnnnnnnnnnnnnnnnnnnnnnnnnnnnnnnnnnnnnnnnnnnnnnnnnnnnnnnnnnnnnnnnnnnnnnnnnnnnnnnnnnnnnnnnnnnnnnnnnnnnnnnnnnnnnnnnnnnnnnnnnnnnnnnnnnnnnnnnnnnnnnnnnnnnnnnnnnnnnnnnnnnnnnnnnnnnnnnnnnnnnnnnnnnnnnnnnnnnnnnnnnnnnnnnnnnnnnnnnnnnnnnnnnnnnnnnnnnnnnnnnnnnnnnnnnnnnnnnnnnnnnnnnnnnnnnnnnnnnnnnnnnnnnnnnnnnnnnnnnnnnnnnnnnnnnnnnnnnnnnnnnnnnnnnnnnnnnnnnnnnnnnnnnnnnnnnnnnnnnnnnnnnnnnnnnnnnnnnnnnnnnnnnnnnnnnnnnnnnnnnnnnnnnnnnnnnnnnnnnnnnnnnnnnnnnnnnnnnnnnnnnnnnnnnnnnnnnnnnnnnnnnnnnnnnnnnnnnnnnnnnnnnnnnnnnnnnnnnnnnnnnnnnnnnnnnnnnnnnnnnnnnnnnnnnnnnnnnnnnnnnnnnnnnnnnnnnnnnnnnnnnnnnnnnnnnnnnnnnnnnnnnnnnnnnnnnnnnnnnnnnnnnnnnnnnnnnnnnnnnnnnnnnnnnnnnnnnnnnnnnnnnnnnnnnnnnnnnnnnnnnnnnnnnnnnnnnnnnnnnnnnnnnnnnnnnnnnnnnnnnnnnnnnnnnnnnnnnnnnnnnnnnnnnnnnnnnnnnnnnnnnnnnnnnnnnnnnnnnnnnnnnnnnnnnnnnnnnnnnnnnnnnnnnnnnnnnnnnnnnnnnnnnnnnnnnnnnnnnnnnnnnnnnnnnnnnnnnnnnnnnnnnnnnnnnnnnnnnnnnnnnnnnnnnnnnnnnnnnnnnnnnnnnnnnnnnnnnnnnnnnnnnnnnnnnnnnnnnnnnnnnnnnnnnnnnnnnnnnnnnnnnnnnnnnnnnnnnnnnnnnnnnnnnnnnnnnnnnnnnnnnnnnnnnnnnnnnnnnnnnnnnnnnnnnnnnnnnnnnnnnnnnnnnnnnnnnnnnnnnnnnnnnnnnnnnnnnnnnnnnnnnnnnnnnnnnnnnnnnnnnnnnnnnnnnnnnnnnnnnnnnnnnnnnnnnnnnnnnnnnnnnnnnnnnnnnnnnnnnnnnnnnnnnnnnnnnnnnnnnnnnnnnnnnnnnnnnnnnnnnnnnnnnnnnnnnnnnnnnnnnnnnnnnnnnnnnnnnnnnnnnnnnnnnnnnnnnnnnnnnnnnnnnnnnnnnnnnnnnnnnnnnnnnnnnnnnnnnnnnnnnnnnnnnnnnnnnnnnnnnnnnnnnnnnnnnnnnnnnnnnnnnnnnnnnnnnnnnnnnnnnnnnnnnnnnnnnnnnnnnnnnnnnnnnnnnnnnnnnnnnnnnnnnnnnnnnnnnnnnnnnnnnnnnnnnnnnnnnnnnnnnnnnnnnnnnnnnnnnnnnnnnnnnnnnnnnnnnnnnnnnnnnnnnnnnnnnnnnnnnnnnnnnnnnnnnnnnnnnnnnnnnnnnnnnnnnnnnnnnnnnnnnnnnnnnnnnnnnnnnnnnnnnnnnnnnnnnnnnnnnnnnnnnnnnnnnnnnnnnnnnnnnnnnnnnnnnnnnnnnnnnnnnnnnnnnnnnnnnnnnnnnnnnnnnnnnnnnnnnnnnnnnnnnnnnnnnnnnnnnnnnnnnnnnnnnnnnnnnnnnnnnnnnnnnnnnnnnnnnnnnnnnnnnnnnnnnnnnnnnnnnnnnnnnnnnnnnnnnnnnnnnnnnnnnnnnnnnnnnnnnnnnnnnnnnnnnnnnnnnnnnnnnnnnnnnnnnnnnnnnnnnnnnnnnnnnnnnnnnnnnnnnnnnnnnnnnnnnnnnnnnnnnnnnnnnnnnnnnnnnnnnnnnnnnnnnnnnnnnnnnnnnnnnnnnnnnnnnnnnnnnnnnnnnnnnnnnnnnnnnnnnnnnnnnnnnnnnnnnnnnnnnnnnnnnnnnnnnnnnnnnnnnnnnnnnnnnnnnnnnnnnnnnnnnnnnnnnnnnnnnnnnnnnnnnnnnnnnnnnnnnnnnnnnnnnnnnnnnnnnnnnnnnnnnnnnnnnnnnnnnnnnnnnnnnnnnnnnnnnnnnnnnnnnnnnnnnnnnnnnnnnnnnnnnnnnnnnnnnnnnnnnnnnnnnnnnnnnnnnnnnnnnnnnnnnnnnnnnnnnnnnnnnnnnnnnnnnnnnnnnnnnnnnnnnnnnnnnnnnnnnnnnnnnnnnnnnnnnnnnnnnnnnnnnnnnnnnnnnnnnnnnnnnnnnnnnnnnnnnnnnnnnnnnnnnnnnnnnnnnnnnnnnnnnnnnnnnnnnnnnnnnnnnnnnnnnnnnnnnnnnnnnnnnnnnnnnnnnnnnnnnnnnnnnnnnnnnnnnnnnnnnnnnnnnnnnnnnnnnnnnnnnnnnnnnnnnnnnnnnnnnnnnnnnnnnnnnnnnnnnnnnnnnnnnnnnnnnnnnnnnnnnnnnnnnnnnnnnnnnnnnnnnnnnnnnnnnnnnnnnnnnnnnnnnnnnnnnnnnnnnnnnnnnnnnnnnnnnnnnnnnnnnnnnnnnnnnnnnnnnnnnnnnnnnnnnnnnnnnnnnnnnnnnnnnnnnnnnnnnnnnnnnnnnnnnnnnnnnnnnnnnnnnnnnnnnnnnnnnnnnnnnnnnnnnnnnnnnnnnnnnnnnnnnnnnnnnnnnnnnnnnnnnnnnnnnnnnnnnnnnnnnnnnnnnnnnnnnnnnnnnnnnnnnnnnnnnnnnnnnnnnnnnnnnnnnnnnnnnnnnnnnnnnnnnnnnnnnnnnnnnnnnnnnnnnnnnnnnnnnnnnnnnnnnnnnnnnnnnnnnnnnnnnnnnnnnnnnnnnnnnnnnnnnnnnnnnnnnnnnnnnnnnnnnnnnnnnnnnnnnnnnnnnnnnnnnnnnnnnnnnnnnnnnnnnnnnnnnnnnnnnnnnnnnnnnnnnnnnntagtaaataagataatttgtttctgccccccaaaagattaaaatatagatttttttcaaagtctgtttttttaacacctacggtccctgaatatgttcgattgaggtttgtgtctgtaatttggaacggctttttgttgcaactaaaatattcatttgcagaaattatcactgagggtgttagcttctttatgcttgcgtttcttgcatttgttactaaataaaatatttagaagtcacgtcgattttcaaaatgatagttaaggatgaaggtaatattggcatatttatttttatctgtgtaatttttgcaacttataaccccttcaggtccaaatgaaacaggcaaccaggtaataaaccaattacgttctaatacagattacttcatgacagtgtcttattttccagtttatatgtaggtgagattctttggagaccgtcttcgtaatatagctagtttttgtccattcattttgctttgacttccttgtataggtacaaaggtgtaagtaggagagtctaccaggcagcacacagaygtggccctgtaaccacccttgtgtaaaatcagagtaatcctccctatccttgcttatttcactgggttcatgggtgatgactgtaaatgacacaggagacagggaaagagttttgttatcctgatacacacattcttaaatgcctctagctgtgtagacattggtttgtccatattaatagtatttyacgaagtgccagttgtgtgcctgctttgtggcatatgcattggcattcattgctttatttaattcttccaacaacgtgtcagatgtctgttcaaattattcccccctttacagacacagaaactaagatttagagaggttatgcaatgtgccaacagggagaagttggagctggaatttgaaccaggctggctgactccaaagctgtgtcctcaagcagtacatcagagccgaggaaggtcaagtttggaacgccatttagctgctctcagggagtctgattactgtttctctgttgaggctcagctcaagccttccctgggccatgaaagacaacttaggtttgggtgtcctgtgtttgtaccttgttttgtgcccacctacatcctgggttatgtctttccccaccccaagccttttttgccatctctttttcccagaaagactggaaacttgcctaaagagacagaatcccagatcccagatggatctactattttagaatctctgcttccgcatttctaaaatccttcccagagaattatttgactagttaaagcttaagaaacaccccagtggattatgagtgccttctagccaagaatgggtatttcctctgtgcaatctgagggcccgggacactcctccagcggagtagcctgtgatttgtatgggctgcatgaattcctgcactaacaaggtaaaagaaggatgttaaagaaaacccgagatcttttgggtacatgctataaggtgaaaggcttatttccatttgctcaagaacaaacatccatttgtccaccccaagtatttatatagttcaattaagcgggcaggtaaactgattttttgggtggttaatgatctgatgattttcctctctgtcattgtgattggatatgataatctgagagttgcccaaattagtgcctttactgtagttataataatgtcatgatgactgaggatcactgagtgtgccttttgctctgttaagtgtgcattcagaactttactaacatgggttccacaggaaatattagccccattttgcaaatgaagaggctgaggctcagaaatttaaaattgcttcatgtcgcacagttcagtgtaaagttgcaatgcaaactaagatgtttctgttgcttataatcttaactataataatcataaaccatgttctgttgctcagaacccttgtacttataatataaaacaatctttttaaccaagattcttcgcttgggtattctgagtagcatggaagagcattatactttttttttttttttttttttttgagacagagtctagctctgtcacccaggcctggagtgcagtggtgtgatctcggcacactgcaaccttcgcctcccaggttcaggcgattctcctgcctcagcctcctgggtagctgggactacgggagcatactaccacacccaggtaatttttcatttttggtagagacggcgtttcaccgtgttggccaggcttgtctcaacccctgagctcaggtgatccgcctgccttggcctgccaaagtgctgggattacagacatgagccaccaaacctggtcaattttctatggggtgtgttacattttttaaaattttattttactgtttatatagaaaaagttgccttatcaaccattataatcatggtatttagtgagtgtaatctgttctgatgtaatacttagtttaactggtaaaaaatattttgacagaatttaagattagttctttttgctttgtccgtcaatgtgaaataatcagtatatcatatttatagaattctgctaaaacatgcatatatacataaacagatattcatcttaattgatgttaattgagatataggagtacttcattaagtctccagaatacatacttcataagcaggaggcatatatgtttgtatatatgtatgtacatagacttsatacacatgaaataaaatttcaaatggttcctctgttcmgcaaacgtgacccaaagttttggcttatttggcgttttgttttcttgaagacatacttgaattttaaatagttaatccatttaagaagtttcatttaaggtactgttaaaaagaaaaaacacagaacaacacagtgagagcagaaaaggtatcatctcctcyccctcttcttctcttttagaaaccttgctgcgtgatccactgatggtaaatatttcatgtactttgcatatcagcctgagttccttttgtgaagtcaggtaaatggaatgtaaatcccctcgtcctccagacagtaaaacggcattatttgatgttacatcgcataaagatgcagatttgattccccctttactcacactataaaaacaaagtttttaaagtggttagccatacctggaaatgtaaatgcattcgcstaatgtaatgccaaagaaaaattaagacaaatgataccacatcgctgccacaaactgcggctcgtacaaaattcactttagttattatgctgtgaatacgggctctcaccctcctccgtgaatgcacaatttatgttgaatgcaacatgaatcattttaatagaccaagcaaaaagtccccaaagtcgattttcaaattatgaaccttggaacagaatataacaacagcgaacaacaaatagttcagactttactctgagctatgagtgaaccattaaagatacagcaagcactttcggtgaggtgttacacaattcatagcctaatggcaaaaatatcagaaatggggtattttttaatgctgtttttccagccatcattctgttcaattattttcacatttgtgtaatcaagatattcccaaacagaacatagagttgtgtattgttgggaactaattatatgtattataaatccaagaattaatttaaatgacccagtttccacagagaaaaagccacattgtttttamatagctaactaaacaaaatgctaacccatatgggagaaatttccaaagaattaaaaccacccaccaggaaaatgggaaagtctcccctccacacacacacacacgcrcrcrcgcacacacacacacacacacacacacacacacaaaatcaccaaatcacacctgaacaagaggaagaaaattaaactcattgaggagataccatcttttttaaaaaaaaaaaaaaaaggcagcaaaatgtgagatgggcgtttattatgagatacacgaagacagagaccagaggttccccaagtagcccctggacctgcagtgtcagcatcacctggtagcttgttagacatagaaattcttgggctttattccacacataatgaatcagaagcttatggggtggggcctgcagtctgacgtttattttttctaaaactttaagttycagggtacatgtgtaagatgtgcaagtttgttacataggtaatcatctgccacggtggtttgctgcagagatcaacttatcrcctggatatgaagcccagcgtccattagctgttgttgctgatgctcttcccaccacctgcaagccccagtgtgtgttatccgcctccaccgtgtgtccatgtgttctcatcatgcagctcccacttataaacgagagcatgcagtgtttggttttcagtttctgcataagtttgcctaggataacggcttccagctccatccatgtccctgcagaggacatgatctctttcctttttatgattatataatattccatggtatatatgtaccatattttcttcatcctatcatttatgagcatttggagtgattccgtgtccttgctattgtgaaataccatttgacccagcaatcccattactgggtatgtaaccaaaggaatagaaatgattgtattataaaggtacatgcacatgtatgttgaytgcagcagttttcacagtagaaaagacatggaattcacccaatccgaattttaacaagtcttccatgtgattctgagacagactcatgttcgtgtggttctggctctgcagaactgaggtgggccccaaaacttgmgtttctaaaaggtactagctgagcatgatgactcacatttgtaatcccaccactttgtgaggccgaggcsggtggatcgcttgaggccaggagtttgagaccagccttgccaacatggtgaaactccatctctactaaaaatataaaaatttgccgggtgtagtggtgcacacctgtagtcccagctatttggaaggctggggcaggagaatcgcttgaacctgggaggcagatgttgcagtgagccgagatcaggccactgcactccaacctgggtgacagagccagagtctgtctcaaaaaacgaaaaacaaaaaaaaccaaaagactaaatgtataaaaggtacccaggtgatgttgatgctacttgtcttggccaatgaaatgaaaagcctacaggccaggcatggtggctcatgcctgtgatccacaactttgggaggctgaggcaggcagatcacctgaagtcaagaattcaaaaccagcctgaccaacatggtgaaaccccatccctactaaaaatacaaaaataacaccaaaaaaaaaaaaaaaccacaacaaattagccaggtgtggtgatgtggcctatagtcccagctatttgggaggctgaggcaggagaatctcttgaatccaggaggtgaacgttgcagtgagccaagatctcaccactgcactctagcctgaacttcagagagagactatgtctcaaaaaaaaaaaaaaaaaaaaaagcctacagttgacaggcagataacagagggagcaaaggagtcttgtggaagacaatagggagtgttgaggacctgtcaaacaacacagtccccatctgtactttgggagggaaggacttcttaattccagctgcctgttgccatgggggaacatagacccagaactgccatcytttctaatttttttaaaaattaaaaggctaaaagttttggcttataaaaatggtatttcctgagtttttacaattatagtattaagatattcctaggtttttgtttgttttcgagacgaagtttcgctctcatttcccaggatggagtgcagtggtgcaatctcctccgcctcccagtttaagccattctcctgcctcagcctcctragtagctgggattacaggcgcccgccaccatgcccggctaattttttgtattttttagtacagacggggtttcagcatgttggccaggctggtctcaaactcctgacctcacgtgatccacccgccttggcctcctaaagggttgggattacaggtgtcagctagtgcacctgaccctaggataatcttaattttaagtaactggtaactcataaatttttaaacactctgcagttcaaagaaaacatgtttgtggtaggtagycagtttataacctgtgtaagactgtgttattagcaaatccctcaatgtgttgaccaagagtgggtaggaatcctgcagacagaatcttttgaaggtggtttgtttttttattcctttataagtacwgttgtagatttacaaagtaattgagtatatagtacataaggtcttgtgtacccaccgatcgcaattgagcatatagtacatgctgtcctgtgtacccactgatccctggtcctgcccctggtatgagggtattaacatyttgcattagtgtggcacatttgctacaattaataaaccaatatcgatacattattaactagtctatagtttacatgaggggctgctgcttgtgttgtacattctataggtttgttcaatgcataatgacaggtgtctgtcatttcattatggagtgaaaccattccaatttcatacagcgtagtttcacgcctctaaaagtcccctgaaagtgttattaaaagtactatctggccatgtcctcatttccccagcaaagtccttctgagaatttaggcgctttaggctagaggatctcagtgctcagaatgaaatatccctgtactccaagatgcctccagcaattataattgaatcttgaagctagagtttcttggctatcctatttcccttttgtttccaccatgaagaagtggagagccgtgtgacstcagtggtagagctgatgtagaagcgccctctctgttcctggcagtgcctgtcctgctaacctcgtgtctcttgctggggtcttcatcagtaagagacctcacaagatgctttatcaggtcacttggcaaccaagctgatgaggatagcagtttcttttgttcttttaaaacatatataaaattatttttatcaaacatgacagatcaaaagccttctggaaaggagagatggtaactaatttaggcagtgtcttttgctttcacatggtgtacccagtactattaatatgaatttatcacatggaaacaaacttttaaaaaaattaattttgtgaattaaataaagcagcatgcaaatttactatcgtattcagcaaccaaaattttatcacttgcctgatactgcctagtgagcaggtggaaatgtagacacccaaacacccttcatggattcccagctgctgagagtttgaatagtatgtgaagtctgtagagacaaaattgttgttttccccagttgtaaagtgtgcaatattatccttgcaaaattgtctgtttattttttttgcccttttgggggacaaaatgtctttatgttaaattgttttattattgttatctttatggagttaagggcacataaaatattcttacagagagarattctgtagtttccacaagtaaccagagaattgttcatggcagagaattattttttcaatgcctattttctcctgaattttctgacggagttagagataggaaaataccataatctgctataaattcagttgaaaaatagaaatagtgagaaatccaggttgtgctctgtcgtaatttaagcctaatatgtgattgtctacatgtttacaagttaccgcctttttatttcttctctttttctgttttcttcttccatttttatgttttgctatgccattcattcattctattcttttcatttctttttctttttgtaaaaattgtacagagtttaaarttagtcaggtatgtctattaaatttttacgtaaaaagttaaagcagccctcagcatcaacttyttcttcatttctaactcatttagtgaattcagttggtctttatatatgtagctttaagtaattgcatgtaaactgttacttcttcattttctagtcttagatattatctgtaggtttttcaataagaaggaaatttagcttccttctactttggtgccccatgatgatgtgcatcttttttatttctgcatcatatccatatagtgatatcatgtataatgatgtttaagaagacagttwtttttgtttaaattgttataaataagtaagtgtatgcaccactatgccatgtagcatatcaagattatttttctttcctgcaccttatwttttccctggagttaatactcatctttttttagaaatttgctgagtttgtgatgtacctatcattcaacctcaaactttcatgtgattgtctaaatctcagttccttttattagaaaaaaaaaaaaaaacaactcccctggagcctttgtaccttctgyagtttggggttgttgtcctttttgcttggtgcacaggaatacttggtgatgttctttttaaaactgccctcacattgtatcctggaaagttcatttacctgtacccggagttggaacttctcttccacatcttttcctgtattggtttggttattgttttgtgggagcatgtcttgtagtagctttctgaaaaaggatgatagaatatgtgtgtgtgtctgtgtgtgtgtatttcaggtttcaaaatgtttctgttccatcctcattttattcattgttagggatagaattacagatttaaaatcaattttgcttcagagttttaaattctattttgtggctttctgtgttgttctcgggaagtacaaacccttgtgaccgctgttctctttcatttctatctgcttctctcttgggagtacaatgggaggcatatcatcaaccccttgctgctatccaaataggagactgttccctttcaagagaattttaggtattcagatcctagacctcccagatggcctcataagtatttttatcctctatttatctttgtctttgtgttactttcagggatagttcttctagtctttccatggnnnnnnnnnnnnnnnnnnnnnnntttccatggatgatgttactcttttaactctctgatgttaatgataaattgttttaatttttcttttctgtttagtttctatcttctcaaaattgttttcatttgttttggtaattgtgtttgatgatagtctttttttttttttgagatggagtcttactgtgtcacctaggctggagtgcagtggtgtgatcctgcctaactgcaacctccacctcccaggttcaagtgactgtcctgccttagcctcccaagtcgctgggactacatgtgcgtgtcaccaagccgaactaatttatttttattttttgtatttttagtagagatgaagtgtttaccctgttggccaggctggtcatgaactcctgacctcaggtgatctgcccatctcagcctcccaatgtgctaggattacaggcatgaaccaccacacctagcctcttgataaagtctttccccaaatgttctgatctgtggatgtctgtttctatctaagtagaattcaaagttactgctgccaactcttagcacatggccacggccagttaactgtggactcctctgaaggatgatctggctggactattttttgggaaaaccactgtgtttgaatgtttgcatgtgtcctgttggcagaacaaatatcccacagaaggatcttcttatcttctgcttggggaaggtgtagctctgactgctagagttctagagccaagtgagggggagagttctgagtctctgcattcagtaggtaaacatttacaaagtctgtgttttcagtatcatgccactgttctcacctgtttatgttctcttctgataataaacttctgtcatttttctggagttatgaaatgatggtatcctgctgggctgagtggggagggattctcaagctgtacatagctgacacacaggtttctaaaaggttgtctttcacccccattttcagaagtaccaggttccacattttctgagcctttgctggctctctgataggaattgtgttacttctcagctgtccccatggctagcttaagactcagctctcttaagtcacttcctagttgtccatctgctttccagcatccaactgtaattttttttttttttaagagaaatgaagtctcattttgtttcccaggctggtctcactgtaattcctgggctcaagttacctctcaccttggcctcccaaactgctgggattataggcatgaatcgctgtgcctggcctcaactttaaatttttatattgaataatctttgatttgtattgtcatgttgttttatagcagttactgctgttttagtgtgatttgggatgaaaattttaaaaaatcaatatgtataatccaccatctttgttccttttatttttatgttactcattcttttaagcttgtcttagacgtgagtattatgttttattttgctgggagaacaatttgggaaaatttgagcagcaaaccataagtttcttggtgtctgtgtacttggagctctgaatcactattgtcactgagggagtggacaggaagtgatgctgagataagtctagatgggataggtgggcaacatgcaggagaaacctcctgggaaaggtgagcaagagcacacaggtgagacatagcatcgagtgtggaaacctccatgggtggcaggtcagtgttgctgagggatgtggacatgtctgaggccaaatagatgagtccctattgggttttgcctctccacaatctagaggaatatttatggaaggttaacagggcatggtggtgcacacctgtaattctagcacattgggaggctgaggtgagaggattgcttgtcttacaggagttgaagactagccttggcaacatagcaagacctcatctctacttggaaaaaaaaaattagctgggcatggtggtgctcacctatagtaccaggtacttcggaggctgaggcagcagaatggcttgagcctgggagatcaaggctacagtgagctgcaattgtgccactgcactctaatttaggcagcagaatgagactatgtctcaagaaaatgttcaagaagaaatacaaactattgaaaaaggaaggctgaatgctttatcagaaaactgtatttagaggggacctttctggggtcttttagtcagggtacataagtgtcagctgctacgacaaacaacttgcaacgtctcattatcttcatacaacaaacgctgatttgttcctttcattacatayccagtgtgagttggctggaaggtccaccctacacaaccactcgtgaaggcagacttgaaggggactccactgtcttggagctacactctaaaacaaatagcctccaaagtcaaggactctgtaacaggatgaagcagcattttttatgggcaggtttgcacgtggcatttgttgcttccatcaacattccactggcgagagtgagtccctggcccctatgtaattatgagggaggctgagatgtgagaagcacatgggtgttgggagagcactaaaggtctctagcccagaagcatgacttccagccaagtgagacagggaagsccagaaaaatgtgtcacagaacttatggcatcagaatctgattcccaggcatgctttccaccatatgcatagacatttgcaccccagggatagcaccattactcccaaaaattgcaggtttgaaagggtacctaaaaacaagccaccagattgtcccattccactrtcattctgccatcaacaccgaggtgtcggagtagcagkagagccacatatttcttagtgaggggacccagaatgatcccttttgtgctagaggatctgagttcatttcatgaaactgaagcatcttcttggagmtataagctcaccttgggatrggcccttgcagatgacaataaaggtattttggcacataaaaaaactgctcagcacaccttgtatttgtatttcctttgacgtgaaccatggccatccagtaggccacgcaacattcccactgccatgttggcttgtttttcttttgttttcttgtcaacataagcctcatgagacaacagcaggatgcaagattgtacaatgrcaccatgactctgytttctgggtgtcctctgtgggctctcagcagtgtccccgatgtggagggtcttcttaytctgtgtgtgtgccctctgctgttgaaagttgcctgtcacccatgatgctgtgctgattgagcaaactaatccataacccaccgccacgttcctcgcctacttgcttctaggcacattaaacggtcagtgcacaggtcctcatttttctcatgcttccatttccatattctcaatcaatcactgatggccagctgtcaacaggcaycatttttggtgggacctgaagatgtatatcccttgttttcagattcctcgcctctcatcatgtaaggtgatgctctgagctgggtcttaaagcttctgggcacagccccccttgagtcttcattatggcaaatctagtgcaggtgctgagaggcggtaactctttaaagggacaggatatggaaacgtggcttcatggacagtattttagtatatttctgtaaatagcacatgtgctagatagcagatttgtgtatggatatgcacccggctagggacctctttaatggtcattcatttgggagatgacctttggttcctaaactggtggacataccaaggactaaaggagtgacttgytctcagttctttgtcattcagctgctttaatattaatatgacacccgttttgggcttgaaaagttttccttctgctgagaaatgatgatggtgacaatgatgacaatgacgatgacccttggttggagcaatgtagtctaaatgtggttgcatcatcttctttcttcctttgccttcctcccttgctctttttctgcccctcatgccggctccttcctcccacatcaccccacatttttttttctttctcctcaccatcaagaaatgttccagaatgccattattcttcgtcaccacggtcaggtatatcatcctaagggcagagggtgaaggtgcgtaattagtgtttcaccagactgagcatcatcctcggtgcaggggagaatggctggtatttatgagtgaatggcagcgttttgacaggatgatgaataaatatgctgggcccagaggactccaggtgataagcatttctttgtggtctggtaagtgatagcacccattgcttaatttctctaaaatctgcatttgtcaattttgtatttttttatttgaaaggtatttgcttaaataaataggccatataaatctagctcccaatgtccattttcaaatgatttccagcaaggaagatggaattaccacgaggaacctgttctcttatgtttctgcttagatggctgggtctataccagggtttatttaaatgaacacaggaaatgccattcacctttaccatgaatgggaatctttgcctgtgactctatcgtgtgaattagcagagcttggctattattcccctacttcggtagatactggctgtacagaagggaaccccagtttcaatgagtacctatgtgctgggcacttagctggtttttacacacatacttcatttgaagggaaggaattgactgaaaagaattctccattccaacttcccaagtcagttgccatttggccctgataaagctgtactttctcacttgttccttatttaaaatagagaaaagtgcatcaagctcttgttaatctgtcaggccttcctaagatgtctgaagaagttagtttggtgaacatgggcttcagggtcagactgcttgtgttccattcttgatcctatcacttccttgctgcgggaactctggaaagtcacttaacctctctgagcaagcttccatttttccaggtgaaaacgggagtttagcctagtccccacttgataagatggttgtggaaagtattgtgcgtcatggacctaaagtacctaggagattggcctggatgtcgttttctcataaagttgactatggctattggtggtactagtatgnnnnnnnnnnnnnnnnnnnnnnnnnnnnnnnnnnnnnnnnnnnnnnnnnnnnnnnnnnnnnnnnnnnnnnnnnnnnnnnnnnnnnnnnnnnnnnnnnnnnnnnnnnnnnnnnnnnnnnnnnnnnnnnnnnnnnnnnnnnnnnnnnnnnnnnnnnnnnnnnnnnnnnnnnnnnnnnnnnnnnnnnnnnnnnnnnnnnnnnnnnnnnnnnnnnnnnnnnnnnnnnnnnnnnnnnnnnnnnnnnnnnnnnnnnnnnnnnnnnnnnncccaggtgttggagaccagcctgagccccatggcaaaaccccaaaaaaaaaaaaaaaaaaaaaaaaaaaaattttagtcgggtgtaatggcacacctgtagtcccatctactcgggaggctgaggtgggaagtttgactgaacctgggaagtcaaggctacagtgagctgtgatcctgtctctacacctcagtctgggtggcagagcaagaccctgtctcaaaaaaaaaaaaaaaaaaaaaaaagtaaaataawgcatgggaagtcccttatacagtttgtgatatgggtacacactcagtgaaatggccattaatactgctgttcttaactctgaaarcagagtgggccatttgaatgctcactttgatattttttaaaggaaaaatttgaggcattgacacatgccttttgcttactygcttggattggtttgatcaactttgttgcggtctaatttatgtawaataaattgcatccatttaaatatacaattcaatgagttttgacagatgcacatgcccatgaaaccaacacgaaaataaaaaaaawagaacatttacgtcacctcaaaaagatttcaaatgccacttctgtggtgtatgactctgagtccagacagcctcagctccaggaaaaccctggtctgttttctgtcactattgatgaatttgcattttctagaattttagataagtgaagttttctagtacttgttctgcatctggtttctttcattccacataattaccttgggatgtacccatactgctgcctgtatcagtggcttactcattgtcattggtgagtagtactccattgtgtggagaaatcacattgttttaaaaatacctaattacctgctgatagacatttgggttcttcccagtttttagctgttgtaaatggatactaatgtgaacgaagccaccgtgaatattgatgcactagtctttgtgtggacatatatctgttttatcttgggggataatactctggaatggaatgggcaagggtggtccgtatagggctatgtataactttttaagaggttggcaaatacttccctaaagtggtcatcccattttacattcttgccaacagtgtttaaggatccacttcctctacatccttaataatacttgatattatcggtcttctaaattttctgtttgggtacatagtggtattttgttgtatatttttttttaattgtgaaatatgtgactatgatgagtaatgattttgaacatgaaaactatgcttattgctcatatctatgttattttattatttactttttttgagatggagtctcgttctgttgcccagtctggagagcagtggtgtgatcttggtttactgcaacctctgcctactgggttcaagcgattttcctgcctcagtctcttgagtagctggtgttacagaagcctgctaccatgcctggctaatttttgtgttgttttatttttattttatttttttagcagagacagggtttcaccatgttgaccaggctggtttcaactcctgacctcaggtgatctgcctgcctcggcctcccaaagtgctgggattacaggtgtgagccacagcgcccggtggtcatatctctttcttgggtttttgtgggggttggggtaataggtttattgagatataattcatataccacacagtttcatttttagtgtattgacaggtgtgcagtcatcgtcacaatcaagccatagcttcttttaaactttgtcttccttctctttctaattatctccttcccccgccccctccattctctttccatcctttaaatgtcagtgtcccccacaattctgttgttgaccctttctccctctggccaatgctccttcccctgtagatcatacccattcccaagatttcagtcatcaaatccattccaatatgactcctgtatccatatgtccagttccaagtatctgtccatggtgttggtcccakgttattcgcacctcatatgtctttggcacagcactcttgacagctcataaagtcacgctgttacccccacaatgtccccccacatatcattgctatccctcctcgacacccacacctcytgcatgttcctgagcttcttaggcgtgttgcatcttcctgaccttcccagtccgaagcccaaggagatacttgataaatattcgtctaataaataaatgaacttgtgttctccatattccttgaaaatatgcttcacttttatctttttaagaaattaattgcattactatcttattaaaggtcaagaaaaataattcatatcactcactattcatgagactgctaaatagttgccctggcaatttctgattataattttagaaatatttctaacctctggccttttttcttatctctacttaaagcttttctggaaggaattcattttccactttccttaatgttccttaaatgttstacatatcttaaaagtggattcctcataaaacaatatggactatggtcttattctstttaacggtatgaaagctcgcctgaaaggccaagagtaagattcttttaaaatcatgcccaagttttaaaggaatataaaactttctctttaaaaatatacctttctgctttcatcccytaacccacaaagctcaagtctagtttaattcaaacttggaaatagttcttttattattgctccctgcaatgggaacagagctgaggctcctaaggtctagagtcaacatgaaaatacctttgcttctgggccatagctgtgtttcttcttaacaaggcagaagccyagaagagacttcatgtactgtgactgtaataaagagggttgtaagtagagaagctggaatttgaaaggttacgtacaagtcaagctgcctctgtaatgtcacttatatccaggaaagagtggcaaagaaccatcccagcagatagcttgagggtgggaagggggataggttgttgataatatggaataggaggaaaaagatcatagagccaaagagctcgatacatatactgatgcggtgtttattttattttagttttttgagacagggtctctgtcgctcaggctggattgagtgcagtgaatcttggctcactgtagcttctgcctcttgagctcaggcaatcctcctgcctcagccccaccagtagctgggactagaggcacatgccactacacccagttaattactacattttctgtagagacgggctttccccatgttgcccaggctggtctctaactcctgagctcaagagatccacccgcctctgcctcccaaagtgctaggattacaggtgtcagccacagtgccatgccctgatgtgatgcttaaattcagaaattgggaaggagggtcaggtagctataagcaaaayacaagagaaatataagagaaagaaagacttgtatctgttgttagtgagtttttgtggtgrtgatacattaatggaggcaacagagggtcagaaatcagggaaatcagggtggaaaatagcccagcagaggggaaaagaggaagtctgaacgagggccacattgcagatagaggcyggtgtactggtctgctcaggctgccataacaaaataccacaggctggatgacttgaacaacaaaaatacattttctcatagttgtggagcctagaattccaaggtcaaggtgccggcacagttgatgtcttctgaggtctccctcgtctgcttgcagacagccgccttcccaccgtgttctcacgtgacctagccgctgtgtgcatgcatccctggtttcttttcctgtgttcagatgtcctcttctttgaaggacaccactcagtattgcaataggacctgccctgatagcctcattttttacataatcacctctttataggccgtacctccaaatacagtcacattctgaggtagtacgggttaggtcttcagcatatgaattttggggaaacagaatccagctaacaacagttggggatgaggctataacgaataccactgcctaatgtttgcacggggatatcatgcttttcagagaccatctgcatccttatctcacttaatccttgccccaccctttagaagaagccaggaggaggtcctagtcagctgatgtgagattacatggccctgactgtcttgcctggtgctgcaggccaccttcacagccttgccataccttttcccatttatccatggattggtatgagccctaatggtgcacccttccgacaatccttcatccttcccagacgtttcatcagccaagtgaaatttgcaattgtttcagtgattgaaattatgcttggagtgcaggtgtcatggatgaaacagcaatgccttgcggtgacaaattcagtgtagaaataattttagcaagcccagtgattggaaaacaatgactcaactttaagctatattgattttgtatttctgggctcagcttttgactcagtctcattccccagaaataatccctgttaacatttcggtttgtgttatggaagtgttttctcttctatgaattagctaatgcccataccatacatatgcctgcatttgtacactcttaagccaaataacatcgtactgtgtattattctctagtagcctgctttttattgaacttaatgataaatggcaaacatttgaccatgtcacttaagtttcttaccgtgatctccaacagctaggcaatattctgtcatatgggtttaccatacttttctcaatccacaatctcatcagagtcccaatagttgcctgatatgtctccatcagttgtgaggtatgtttcaaatgatttattactagaaattcttagcgagctgaagtttgtaaattttctcaagctactttattgatatataacacagatacataaactttgcccattcaaaatgtacaattcagtgctttcagtatattcagagagttttgcagctgtcaccacagtcaagtttagaatattttcattttcccaaaaagaaacccttgactggcatccttttccccacttccttttctctccactcccaacctctctcccagctccaggtaaccactcatctactttctgtctctatatagatttgcctattctagacttttcatataaataaatcagatactgtgtggccctttgtgtctygatccttacacttagcatcatgttttcaagggtcattcatgttgtagcatgtatcagtacttctttttttagggctgagtaatattccatttacggatatgccacatttcatctatgcattcagttcayggacatgtgggttgtttccacattttggctattgtgcataatgcttccaggtacacttgtctacacatttttgtgtggatataggttttccttttttggggtatgctcctaagagtgcaatttctggatcacggggaactccttgtttaaccttttgaggagccaccagattgttctccacagcagccacacccatctacattctaaccagcagtgtaggaaggttccgatttctccatatcttcaccagcactcgctgtcatttttctttttagtcttgtcattttattgggtatgaagcggtattgcattgtgattttgatttggattttcttgatggcttaggatattgaacatctcttcatatgattattggatggatgatttttttcagcggttatcaggtcacacctgtaatcatgcccacctcattttcttacagtgcagtgtgtgcttttaggcacataccaagagcttacagagatccttctggttcagaggaaagattcacatccccaacaaacactgctccccgattacaatatagagaggctaaattatagtccatatcacttttcctttaaatccctttacttttttgtgctacaagagtttcagaataataattcygcagaaaaaagtactgattgtccagcagttgtgtcaggtagaaaactgggatgcccgactgcattggtttagccagaactgtggccatgaaaccttgcctggcccccagggatggggtgaggggggatatcatatatgctttaggtggggcagaggggtggtctgcccctgtgcaggcaggaatgttcaggaagcaggctgcctctgtttctactctaaatatttaacattcacggatggcatggatcctgactaagcggagcagatgctggctctatattgcacatagctcctgaatatcagccctgcttggctatgcatgtgttttttgttagtttttgagacagagtctcggtctcttgcccaggctggaatgcagtggcacgatgttggctcactgcaaaccctgcctcccaggttcaagcgattctcctctcccagcctcccgagtctctgggattacagacgtgyatcaccaggcccagctaatttttatatttttactcgagacgtagtttcrccatgttggccaggctggtctcaaactcgtgaccttaggtgatatgcgcccctcagcctcccaaagtgctgggattataggcatgagccaccacgcccagcagtatgtttgtttttcttcaaacctagatcaagagtcaaacactcaaatgtttggtgggagcagttgatgatccagagctttggagtcagcgagacagtagagagtggtggagatggtggcgcacaagagggtcagtgccccatctcaaggaacagctgcacctcrgcctaygcgattgtgaaaatgtgagcatatgcaggccagaccttggcttctctgtcttcatttttcacaggagccagaagtttggatgtgcaatgtgaaatctcacaaattaaacatgttacataactgtattttgtttcctatctctgctgtaataaattttctcawtgttagtgacttagaaccacacaaaagttacactttacagttttggaggtcagtggtccaaaataggtctcagtgggctaaaatcgatgtgtcagcaggacaccatttytttctgtaggttctagaagagaacccacttccttgctgtttccagcttccagggactgcccaaatcctttggctcatggccccttcctctatcttcaaagccagggatggctgctcaagtccttctcaaactgccctgttcctggttctctctcttctkcttctgcttttaaggaaccttgtaacttcagggagtctaccctgataatctgsgataatctgcctrtttgaaggtcagccaattagcaatcttaatgccatctacaaccttaattaccatttgctatgtaacatatttatagatatcagggattagttcatgaacatmttggggtagagggcattccacatacagcagtacctataatgtatatgcttcttaaagaatgcatgagtcttatttattttatgtccttggagtgtatagcagagttagatagatctttctggattggcggttgattgaatattggctgtacaaagaaactggttaggagtatagagaaaagatcaatcatagcactagcttatagtttattttattctttaatgattttttaaaaatatttctctcacttacttgaaaagcagtcttagaaattaactggaatgggtaatttatttgtctttcttcttttgtaaaataatggcagtttgtaactcagatttttgtatgaggaataaataaaatactgtctgttttcctttgatctttctatttgtggtccagccagccagctaactatgcattcctttttctgccttttcatcataacacctatcttagcaactcttcattgctgctttgcaaagaggatttgagattgtttatgtaggggcccgtgtataatacctcaagagaaaaagacacagatgaggctattgggattaagggaaaatcaagtaaatcgagaggtaaagcactgtgcagaaatattggccagaagctatgaacagttgccacagctgggctgaagagttacctgtgagccttccaggggtgtaagccaagagaaagacagttcaccaaatctatcgattaatagaaatcatccagcagcagtgccactgtaagatgttcaatacgtagcacctttctgtcccttctcctctagccagttgggacaggattagcaagccaaagactttctgaaataatccttagctatattcttggtattcaccaaggaatttaccaatatgcaaagacttggggataattagtattatctttgccattacctgcagtaatattatgaagattagagatgtaactctgtcctgaagaactgcagtctgtggctcaccttggagaagaacttaagaacttattgaagtgagcaggctcacctgcctttgctcagagccacatcacctgcaggcaggatctgcaaggtcagcagttagcgtcaagttgcacagcctgggcttgggtggcgttcgctttacccttgcccttgatgtggtgccgagttgtcaggattctcgtaaaattcctgggtgatggcttcttctgttctctttatttccttaactgaacatctgtctaattgttcacctccatcgctttagtgctttcctcatgctttctctctttccagacaataaactttattttcttcataagaattcagtctacgcaagggtattaggcagcttgtttgcaccttttaattgctggatgttttccagaaaggctgtttgcagtagttccagtgggttcatctgtgaatcaggaaagacaatgcagctttgtgttttggtttttatcagttaccttctgtttgtaaacatctgtttggaaacgtttgctggtgcccaccccagcacccctccacccctgccagaaataaagggattaatctctttttgcttggcatagggagaagacagtgtctgctgatgtgcttaactttttttttttttttttttttggtcaggtgcgtaggtatgtgactgaaacccatagactttgcacatattgtcaaatgactttccagagggactcaggcactttatttaattaatgccaatgaagcccgttaatccgctcattactgcagtttaattttgatgctggtttttgatgatgtattgaaaacttgtataaactggcaattacaactggaaaacatttctagtttagaagagacccttatttttcatatgcttaggaatatccagcaagccacttttaaaggctttttatcacattttattcttaagctttctgaattccttattatattttgcctgataaatagttggattttgttttttggttcaatgtaagaatattcttaaactaggtaaactgttttaattgtttgtcattatgttctctcattctgttaaattttgttttctatttttcatgtttttgggtttttctagatggcctgtctttaacacttcttgatatttttgattaaattttcatatatcatcaaaaatagagatgacagccaggggtggtggtgcatgcctataatcccaacacttttggaggccaaggtgaggagaccacctgaggtcaggaattcaagactactgggcaacatggtraagctctstctatcctaaaaatgcaaaaattagccgggagtggtggtgcatgtctgtagtcacagctacttgggaggctgaggcaggcgaactgcttgaacctgggaggtggaggttgcagtgagctgagatggagccactgcactccagcctrggtcacagagggagactctgtctcaaaagaaaagaaaagtagagaggatagtataatgaggttcctgtctgccagtcactctatagtaactattaggaaacccctttttttctctgaagtcattgctccggtgtgtgtgtgtctgtatataaaaaaaagtatgtatacatayacgtatatgtatgtgtatagataaaaatgcatgtatggtgctgggcgcagtggctcacgcytgtaatcccagcactttgggaggctgaggcgggcgaatcacgaggtcaggagatcgagaccatcctggctaacacggygaaaccgtgtctctactaaaagtacaaaaaattagcctggcgtggtggcgggcacctgtagtcccagctactcgggaggctgagaccsaagaattacttgatgaaacatggcagacgacatagaccagcagcaaactaccaacactgtggaggaccycctggatcttaggctcagcccagaggagcgaatttgtgtgaaaatgagaaacgaccgagagcttcgaggcagattacatacttatgatcaacatttaaatatgatcttgggagacgtggaagaaactgtgactactatagaaattgatgaggaaacatatgaagagacatatgaatcaacaaaacagaatattccagtgttctttctccggggagatggcattttcctggttscccctccactgagagttggctgaaacaaagaatttgtcctgtatggaaaacaggagactttgtacagtggcctctctaaatgtgcaagatattcaaaagagaaacccgcatacatttggatattaagaaataattctggggattcttccactcctgaaatgagttgatttgcagataattcacaacttcttaagctaaatggtattttcgtttttctcaagctcttccaataaatatgaccaccaagatttttttttcctaaaaaaaaaaaaaaaaaaaaaagaagaatcgcttgaacccgggaggtggagcagtgagccaaggtcatgccactgcactccagcttgggcaacagagcgagactctgtctcaaaataaataaataaaaatgcatatatgtatatttgtgtgaatcatatacacatatataaaatatatgtatcatatacatatatatcacatttctttttctagtgtgtgtgtaccttgatttatgtctcacatattcaaaataactcaacttgtttaaaataagagcacaacctatttaagtagtaaagattcaaagccttcttctaaaatgcttaactttcctgtggatttgtggacccgtgggaaaatctcagtccccaggcaggaaggaaggagatatgacacatctctagtttgttgtaagtcgcctaccctagacctcatctccagtgctctgaatgtggagaggtaggtgcagggcagtgggatagagaggtgcactttgaaagactatcacatggaaacaaaagttccggctgggcacggtggctcacgcctgtaatccaagcactttgggaggccaaggcgagtggatcacgaggtcagcagttgaagaccagcctggccagcatggtgaaaccccgtctctactaaaaatagaaaaaattagccgggcatagtrgcatgagcctgtaatcccagcgactcgggaggctgargcaggagaatttctkgaacctgggaggtggaggttgaagtgagctgagatggcaccattgcactccagcctggcagacagagtgagactccatctcaaaaaacaaacaaaaaaaagttccaatacacaatatgttatatgagatcttcacccaatcaaggattaaatggccaattcctaaatgatgcctacctttttatggccatgtatacctttgcctcartactactggcatttgctgacatccatttatcaagatacagggatggatttctagaaggcccaggcaggggtgctggccaggagacaccaggcatagaccttcctttctcagagccttcgtggcccctagtttgaatctttgagtcactgcagtaaagttcctgatgtttgasagtactccttatgaagggagtcatatgagttgctagctgggttctctggatggtggtgtcatgccaacatgggagccactagcacaaagaacatgctaggttctgttgagacctgactttgggaatagcataggtacttatctttctcagcaccacacaaacacactccagaatgcaaaggaacctgcactgtgccatcttgcttctccctgcatagccacttctctttccagtggtgtttgtattttggttcattcaatcaatgaatgattgattgaatcaaccacttggtcccttcaatctgtaaccttcctgcaacactgtctttgtgatgttatcataaccttgatttttgagggatagaattgggcataatcagagaaaacgtggtctgggacacatttgtgggctattctatgctaaacatttccatatcattaatgttcaacacagctttgtggtgttggagataggattatcattgttaggatggttattatcaatactagctgtgattattgatcacttccacatgccaggcacagtgctgggtgctacatatttattacctaatttatagcttgctgcactcttgctgggtatgtgtaattattcccatttcacccgatccctgggagtttggtgaattaatcacccagcatccaaatagctaaccggtagcagagctgggattcaaactcagttaggctgacttctgtgcctgttttcttgcctaagcggtggacgcattgagtaggagaaggccagttattcctctttgtcactgatacaactggggacctgttgccggagatgtggagctgtgcattagggctgggtagaacacacataatgaaccatatgcacgagaactttttcatctttctgcatacacttggaactagttctttgttattgtaaaagcatcatgcaccaggtaaaatgtttaataacacagagaaatctaattgtcaagtatcttctcaacacacattaatcaacaattctcmtatcgaaggataacctcttgtatttacaaaaaaaagaagaaaaagtgctgtcatcagtaaattcattcatgtatgttatacacttacatacaaaatgtatctatttgattaaattagaactctgctaatgaattactttccttgattgcacagtaataaagtcaatgttgtaaatataataattatagccaagtgcagtggcttacacctgtaatcccggcactttgggaggctgaggtgggcagatcacttgaggtcaggagtttgagaccagcctggccaacatggtgaaaccctgtctctactaaaaatacaaaaattatctgggtgtggtggcacatgcctgtaatcccagctactcaggaagctgaggactgagaatcgcttgaacctgggaagtggagtatgcagtgagccgagatagttctactgcactccagcctgagcaacagagcaagactccgtgtcaaaaaataaataatatatgtgtgtgtgtgtgtatgtacatgaattatatacaaatgagggaaaatatacaaatgagttgaatatatacaaatgagggaaaaattgttccttgtgtcaggaacaattactgtgaattttgtgtagcttttcctgactttttaaaattcaaatatatttcataaagttgaaatcacactgtggtctttttttttttttttttttttttaaccaaacatatagtggccatgtttctatgtcaatacatactgtttggcagtacagttgtactgacttgacattatagcttcataacttagtaaattaatcccttattgctgggcacagattctgttttccattttttcagtcatgagcaacgttgctggtttacctggggctaaataagaagtttaaatgcaaatagataattcttgagaaagcttcttccctgtatatactctttctgcagcagtgtctgagtgtctgtaccttcctataccttcaccatatcatgtatttgtcattttatagtgagttgtattacttgctaggtgagctggtatctcctttgataacacaaagaaggcctgggtttgcttggcaatttgttccaatattcttttcagttttaaataagttttgaacaaaaagttttagcattttacataaaaacctctaaagctctcaggctaattagtaatgtagcatatacaaattaagtttttttctgctgtgcttaattcttattaacacactaatcatgagagcccccaaattgctgtaaggagcacatttagaaaacatataaaggatcgatagttggtacttaagaaatcgttgaaacaccttttcttttttaatctatcttagagctgaaagataaaaagacttaaaatgagttagaatatgagtttttcagcatcttatagcttatgagttaaagcaagatttaaaaaatacatttaacatactaaatatttcaaaagctacagagataccgtaacatttaaaaaaataaattttcattgtggaaatcaactgccacaaaaacacaaccttttacgagacaacgtgatgtrcatgagaagccctgatgttgagaagctcataattcggtgtgagaaacacacaaggcatgatgccattcccatctgggatgaacagggaagacttcctgggagaggtgactatggacttaattttgctttgacacagcaaaaacatgaggaatgaattttgtgacttggaagattgttagttttctgtggagggaacaacactcatcttgcaaatttgccttcactattcaatcattagaaaataattttaaatgagcttagcagttctcagaattttggatttcaggaaacaaactttttaaaaacaaaacaaaaaggaggataccaatttaagcttgtcaaaaagattttcccccaaaagaaaaacacattaaaaacaacgacaaaaatcaacaaaaactaacactrttcccccatcaacaatcaatattactttctaaaagcaagggcgttttgacaccagatattgtgaggacatccacctgctctaagggacagccatttcactggtgttctgtcaatttttattttgaactaattttagactcacatagaagttggagaagtaggctgggcaccagtggctcatgcctgtaatcccagcactttgggaggccgaagcgggctgatcccttgaggccaggagttcaagaccagcctggtcaaatagtgaaatcctgtctctactaaaaatacaaaaattagcctggcatggcagcgcacacctgtaatcccagatacttgggaggctgagacatgagaatcacttgaagctgggagctggaggctgcagtgagccaagcggagtgccactgcactccagtctgggcgacagagtgagactctgtctcaaaaaaaaaaaaaaaaaaaaaaaagttgcagaaatagcaatatttaactatacttgttactcaaatttcaccactaaagcagtgtcatctttttattccaggatctagtccaggatgccacattatatttaattgttgtatctccttggtgcctttagtacttttttttttgagacacggtctcactctgtcacccaggctggagcacagtggtacaatcatgggttactgcaacctccacctcctaggctcaagcgatcctcccacctcagtctcctgagtacctgggactatacgcatgcaccaccatgcctggctaatttttgcatttgttttatcaaggcagggtttcatcatgttgcacaggctggttttgagctcctgggctcaagaaatctgcttacctcggcttcccaaagtgctgggattacagacatgagccactgcacctggcttggagcattcagtctttgatagttgcttacttatttccttctttctgatcttgagaccttgatttgtccagtattttctcatcattagctgagtgtaagcattttttggcaagaacattataaaaatgatgtggtrtctttcttagtatattatctcaggtagaacataatgttgatctgtctcatccctggtaatgttaaccttgatcacttggttaaggtgatgtctgctgagtttttccaatgtaatgttattaatttttcctttgaaattcataattatttgaagggagatgttttgagatgatgctggcagcccygttttccttaaactttcacatgctgactttctattgttggatcttgcctgcagcagtgtttaccatgatgcttggctagtggtgactatgtatttcccttactctttttatagtcagtaattggaattcttctgaagaaagagctatcccttctcccccatttctttcttttcttttctttttgttgagacaaagtttcactcttgtcgcccaggctggagtgtaatggtgcgatatcggctccctgcaacctctgcctcccgtgttcaggcgattctcccgtctcagcctcccaaggagctgggattacaggtccatgccaccatgcccagctaatttttatatttttagtagagatggggtttcaccactttgaccaggctggtctcaaactcctcttctctggtgatcctcccacctcggactcccaaaagtgctgggattacaggtgtgagctacagcgcctggcccctcccccgtttatttctgattcaattactttatattagcgtagattcacaggtatttcctttttttttttttttttgatttattaatacctccatttattctgttgctgaaaccattccagctttttctggttggcttctatgaaggacgctattttaatggggtgatttttttcttctcactacattcttgctcactccccactttttatgtccggtggccataggctggtgagaacttgattttgaacagttgaaggtctgctgttagggacgtgctaatctagggaattgtactgaactcgtgggagcatgttagtatcagatgtgtgccttgtccgtcttgcttgtaggaagaacaagagacgagacacagcaaggtgatgatgggtatgtgaagcaggataaagaaaaaaacaggacaggcattacaggcttaagyctgtaatcccagcactttggaaggccaatgcgggtggatcacctgatgataggagttcaagaccagcctcaccaacatggtgaaaccctatccctattaaaaatacaaaaattaacaggcgtggtggcgggcatctgttgttccaggtactcgggaggctgaggcagcagaattgcctgaactcgggaggtggaggtagcagtgagctgagatggcaccactgcactccagcctgggcaatggagcaagactctatctaccmcccaccctgcaaaaaaagaaaagaaaggaaaaaaaatcytggtgcttgtaggagaggcatttatttcttttaggactggacggggcttggagggtttccaggaaacagcctcaacctaaaaatagtagacacagttcatgaagaacttactatgtgtccagtagataaatataccacaagcattatcttctttaatcatctcacaatcttatgaaggagatactaatattttgcttgcaaagatgagggaagtgagtttccgaagttgctaartgcgtaaaggaggtggtggtgtcagaatgttatcctgctcagatggttgcatgggacagtgtccagaggaaggcctctgattccttccccagcattaggcaatattcaagtcttcagttccatgtgtaggggagaagactttccttctgctccctaatgacagtggtacccacacccgtattccaccataaaatcttttttattcagtattaggaaaaaagaaacatctttccgtccagtggtcactgtgtgtgtatgtgtttgtgtgtgtgtgtgtgtatgtgtctgtgtgttcaccgtgctgtgtgaattgtggctttaaatgtattcctgtcaattccatatatttttaaaatgttgcttttagagtatgtgcaagtttggggcatttttgagggcttttttttttgacggggtcttaatatgtcacccaggctgtagtgcagtggcgcgatgacagcccactccagccccaaactcccaagctccagtgattttccttcctcagaccccaaagtagctgggaccacaggtgcacaccaccacttccagctgattatttaaaaaaaattttgtagtgacagtgtcttgctgtgtttcccaggctgttcttgtactcctgggctcaactgatcttcccagcttggcctcccaaagtgctgggaatacaggtgtgagccactgtcccaggccagttttaactcacaatgatttcataagaaatccacatctgagagtcccagaaggtaagatattcccctttcttctaaatatacttgaccaccaccattcaggttcttctattaaccctcctatatttgccaaccctcaacctgttagaaacaagaattgggactctggagtagatgttagcaacatcatgagctcaaacccctccagcttacagcggagacagtgaggtcctgtaggatgaggttggagagcaggaacttgccccgaggtcatgtgcagagttcgaggcagggcctggatgggaagcccagcatggagaccccaggccgtctctccgccatcttgttgtgatgcttccggaagaatgcctgtcactcttgctgacatccgactgaccaagtgggcaagaggaattcttcaaaacaatttaataaatgcttacattttctcttggccccgtgccacatccccccactcagtcttgttttcaaggttgaaggttccttcagagctagtgaccttgcccttcctggcctgtggatgtcgctctctatccgtaaccctcctttccagcgaccctgtttgcagcaaagactataattttattttgggtttggatatactgattacattttagcttctggtatattttcttacctgtcacagccattaaatttattttaatagttactctactctcctgatagccactaaagggggaattggatattgtctatcaattggttggtctctgaactaaggctgtatctaattacaaggcattgtatcggttstgatttattaaccatttacttggctttggagaaggcagcatttttagtagtactgttgagcctgcatgtagcttttccaggagggcagggtgccyggatatctgatcttacagttattactttgtgtcatatataattttgttttctccctgcaacaaataaatctttgggactccggaagaaaaaaaaatgggaaagaaaaaaaaaatttgtggttacagtataataaaaataaactgtttgtcgtgactgcagctgacatttatcagcctgtttgtgggtgatctttctctctctctataatacagaacataatttgtcactttgtaaatacattccagtctaaatccctgccagcatctgttagtgtttgaaggattaatgtgctaccctgtgtatgtctgcacttccagggaacagtgtagcatctgattacagatcktgggagagcaggagggaacaaggtgttttctgtgctttttcctacatgcagtcgttttggcctttttctgatttttcttgtctttatcccattctgtctaggtacctggaatttcattctttacaaagatgttcctggtccccaacctttcttctgtctgtgatagtcacagctgaagtcatagtattttctgtgtactatgggttgagctgtgggtaattctttggggccggttagacttgggttcaaattctttctccaactagtttatgagcttaagttatgtgatttccatttcttcacttgcaaaatgaagatgctaatacctacttcttgaagatgctgaggttgagggaagaaataaatgttaatgcaaagtgcccagtttagtgcctgccaagagtaactggtgggtctgtgtcaccttctgacatkatcagtgtgattgtctccaacgcatcyatggaagtgaaaccgttggaggaagctaatgccgtgagccagctgttggttatgtttttgttttgtttttcttttttacttgctggatagtgggttctgtttattgagaaatatttacatccgtctaawtcaggtgcttgctagggttcttggcacacagagcatcccaccaataaactgtggttcccaacaaggcttgcaactgaatctgggcaacaatgaacatgacttcaataatgacaaaaagattcagattcctgctggaaggtccatatgtgctgtccccagtaggattctggaattccctgaatcatagtgttgcttgtaattctttccacattatgaagtggctctatagactgcctaccaccttgtatctactgctgtcgtttagattaggaacagattgccagatgtggaagaaatagcctcattagtaacttttctgtaagcaatctccttatttcttkttttttgttcttttgttttttgtgtgtgcttctgcgtgcmcctcctctatggctccccccaccaaatttctgtgtcttcatttgcaactctcttttctccagtaaagaggaaagtgtatagttctcctttccttacagaaacattattttgttattgttgtttgggtttgggtttctgaagtataaatgcatatgaactggacagaaggattatgcccatgtgccaggtggccaagatggggcttgtgatttgaagcttcttttcctagattcaggaaagtatcactggttaatcagggaatacatctttcggcccattggaaaatgtctgttcttagcaccctaaatgcccaggtattagcatacttgggaaatgtctagaaacccctatttcaatttactgaccatttttggtaaattcctagagatgccaaaatgcatttcaaaaagctttcatgttcaagaagacttgtggaatgatagaaaacatttaacgctgttatgtacgaagtgaaatactgttaaacttttagattatttaatagaagacacattttacaaggcaaagtgtttagatatgctccctcctatgcctatccacacatccttaactcttcacgttgtttgagactgttaggctgtttttttattgtatatttcatcaaatagtgggtgataaaacaacagacactctaaggaatggcatgacattctcctttcttctcctgcattcattggaacctgaatgtagtattaattataagactgttagacttcaggggactacmctcttattctaaaatagtggtcaactaactgtgcccttcagacagaattcctgcccagcacctggctttgtaattaaagttttactggaacagaggaataccagttaatttatatctcgtctgttgccacttttgctttcatgctattaaagctgagtatttgggagatacttgaaaaatctaaaatgcttmctatctggccctttagagaaaaggttttccaatctctgttctagaggattcgtggtcatttggaaagaaaagtatgttaagacaaaatgagcaggtggttggattagtattttctttctacacatatagaaactgttcctatcatacctgactcagttttcaaactkgcttaatccaaagcctggggggtggatgtaggagagaagttgaaattagctggggttttttttttgtatcacaaaagttacattttttttttttttttttttttttaagacgtagtcttgctctgttgcccaggctggagtgcagtggtgtgatttcggctcacagcaagctctgcctcccaggtttacgccattctcctgcctcagcctcctaagtagctggtactacaggtgcctgccaccacgcccggctaattttttatatttttagtagagacagggtttcaccatgttagccactttggtctcaatctmctgacctcgtgattcaactgcctcgccctcccaaagtgctgggattacaggcgtgagccaccgcacccagccgaaaagttataattttaatggtctaaatcaaatttgttcaacctgcagcctgtgggcacatgtggcccaggacagctttgcagcccaacacaaatgtataaacttgcttaaaacatgatgagatattttttgccattttttttcaactcatcagctatcattagggttagtgtattaataytttatgcacagcccaagataattctttgtccagtgtcacccagggaagccaaaagattggacaccctgggaataaaacagaaaaaaggtgtaaaaggcttcgagttcatggacagaacaacatttttgtaagtaaagtatttacggatgtggcccctttgtaatctcctgggctcagggataatttccaggctggggagaaggttgtgtcatggagacagcagtactgttttggaaggagaattgacttgtcacaatggacggagaactaccatcccatttgggccaacctcttttttttttttctttttgtttcgagatggagtctcgctctgtcaccaggctggagtgcagyggtgcaatctcagctcactgcaacctctgcctcccgagttcaagctattcttctgtctcagcctcctgagtagctgtgattacaggtgcgtgacaccacaccccgctaatttttgtatttttagtggagacgggatttcaccatgttggtcaggctggtgtcaaactcctgatcttaggtgatctgcctgcctcagcctcccaaagtgctgggattacaggtgtgagcctctgtgcccggcttctgccagcttctcattatgatttttgagcagatttcgctgctttttcggcctttgttgtgtttataaactagaagtaattatgtcaactttgtaagggctcagtagcgtagaataaggccatgtctgtaatctccccttctgtgaacagaggttatgttctcaaaagccttcaattaacatgagtggaatggattttctaaatttatatggaggagaaagttgtaggtcctatatgagtgatgacaggtgatacttaagttaactggaacatatggcccttagccacaatttccccacatgcccttctgggggatgctttgtagacctgatatcccagaaaggagtgtggactcataaagtcactgctgtcctttggttttcctgatgtaccaaatgtagtaaggcctcttttcaatgtggtaaaagctctgggccaccccataaggctgcaagcgctagaagctcttcccatagagaacatctatatcctcaaaccaaggagaaaaaggaagctgctgttcataaatattgaagaggcagggagagcttgcactgaggccagggtgtattaacatgcatgccatcgtgaagtggcttctaatggacatttgtaaggtggtgtcccctcccttcccctcccccctctaatgctgcctgggttgctctttgcaacacgtgcagtctgcaacttagctggcttttagcaaaattacccatcgcgattcatttgtcccattgggccatgggataggtgactacagagccagattcgaatgtggccctgtgccggtgcccaaaccagcaggctgcacgtatgcactgacagaatggtacatcccaccactgctctgtgtctgtgtgcgactgtcagctgctctctactgctcctcatagacttcctgtctgcctttttctgcatttctcagtctccccatctccccttcttatctaatccccttccttcctctctcaactcttccttcctctatcctttttctttcccttttttttttaactattcttctttagagtttgttttctcattgaacttgtgatgtacacattaaaggaaaactcattaatgtggaaaattaggagcatcatagctaatgtatgctcagggcttactgtgtgctagacattattctgagtttacacagtgatgtcagatttctcctctgtcacagtaagttccaaaagatagtgaagaatattgcagtgaaaacactgaaactcacatatttcatactcaggggtatcttttaagtgtgaagcaagagaaaaaaacgtggaaaaaaaaagactcaggaaatgctttccatttagctttcttgactaagttagtggaagacttattccagattataaagagaagaaccaaaataaagagtttaagaatgaaggggtatgcagcaactggtagggtcgagtctcctcaggcacaacatgcaaccaaggaggggcagctcactcggcctgcgctggccacacaagtgcacctgccacagtattgaggggctggactgatttctcattaatgtctgggcaaaactcaaagaggcaaacattttcattacatactgttatccatcctattgtgggaccaatttctccagaaaggtctctctcggtgggaggattaataaacaccatcagaaatccaattaaacccaattgttaaaatccaacaaatacgttgcttgtggatacagttgtgtatagtaatgtgtatggtgatggcctatcatataggaatgatagaggcagcacagtgctgtaatggaaaccataagggcacgcacaatggctcatgcctgtaatcccagcactttgggaggcmgaggcgggaggatcacataagaccaggagtttgagaccagcctggccaacatggtgaaaccccatctctactaaaactacaaaaatagccaggtgtcctggtgcatgtctgtaatyccagctacctgggaggctgaagcatcagaatcgcttcagcttgggagctggagcttgcagccagccaagatcacaccactgctctctatcctgggagacagagcaagactgtctccaaaaaaaaaaaaaaaaaaaaaaagggcatggatctagatgccagacaatctgggtgcatatctttgctccaaaagcaaagattgtaaactgtctttacaatctggggcaagttagctaatctctgcttcagtttgctccttagcaagatgggatgatattaccacttacctcagagagttgttaaatgggtaaattcatatgtaagtgttcttagagcagagttcagtacatagtaagtactgtgtaagaattggccatcattaatattattcattggataaatatcaaattcaaaataccgtttacattgggaaagggaaaaaggagagaaatatatgagagacgtatgctgggggtatctacgatgttttctttttgatttttttatgtcattttaaatgtttctattcttctgttctgttcttaaagtatgcctgtaattattaggatataattaaggattctgtcttatttattttttaatcttcttactgtgtctatcttttgtctttctccatattctgggagaaacatctaagtttccattccttataactgattatttttcttgggatcaattctggtcttcaccatctgccaatgtgagttttagtttctctataaacttttaaactttaaactttttttcttttttttttgggggggggggcaatccattcttaacccccttccagtttttctcagcctattcttgtttgtttttgttttctatttctgtttcattgagatgcatacaaaatggaagatggccaacatttctaaaaattttgtttcctgacatagagaacgtttagaggtcaggttgctctgagactgtgttgtgatgtcttttttttttttttttttttacttgtttgtcctttcttttattatctcttgctgttatcctcacttttttctttgctgttcttcatcctttaattagcattcaaactaatcgttattagagtgtgtaacatgatctttgacatacctaggtaattttacttaagtatatgagttatgttgatacgcacagttcctcagcatgaatgtcattgttttgcaaattttagctgaaggtgacatcactgtactaaaattttcttgtgcatccacttcctagctatgactctctacagatggatataacttttttaagatgaaaaccatttattttcaatttctagtttaactgcctcacagtaaaaaagtgtactttttgtgatggcaggaatttgaagtatgttgaaactgcctttgtgatctggctcatggttaacttcaataacgtatgaaaagaatccatatttttatgtgtagtgttctgtagctcttttagttggtttatactcttttaatggtctgttgaccattttatctaaatattccattttgtcttttacttatttctattataaatggttaatctcttctactaagattgttaaatccatctttttgtttatggctgtgttatttggcacatgcaagttcatgattgttatatattcttgcttaattatttttccctttatgcatcatccatttttatctttagtgtttagtgttttttatttttattttgcctaaaattttatttttatgttaatatttgctatactagctattctgctttcaaaatgttcctgatgtttttctttatctttatcatttatcttttatctttaacatttttatatttctctcttttaatcatgtgtgttaggtaggcaaggatagctgctaggacaaaatattttctgatgttttaatagcttaacacaatggtaatttatttccagcttatgtaacagtgcttattgggcgctcagttgaggctggaaatagacatgtgagtgttttatggactaggccttgaagaagtgtacctcccttagatttatattccactggccaactctaagtctcacggctatgcctaattgtgaaggagactgggcaatgaatctagttgagtgccctgcaaactaaggcacagggatttttgtgaacagctggtagtctccattacagttctcacatctggacaacaagtaccttttgctcccttattctcacacagagaacatattcacttttcttccaaaggcagagtctcaaaatcccatttaattctttgattctgtgcaaattctagggtctccttcatgcttagatatggttccttatggtcctgtgggtttcagaaaggcagcccattcatgccgtctacccccctgctgctctatataatagaaggtggagtagagacagaatatcagtagcaaaatctccattttcaaaagaaaagaatgagaaacatgttgctccatgacagtcaatgatagaatcacgctggggaggtaaagaaccttgtagtaagagagcattctttatccaggtctgaaatctgctctctggagggaagtgccctgtccattatcctccatggtcccatctgaactggatctagagaagggttactctccttagggaaattagcagctgtcagcccacttcctgctggtgcatggttgaggctccgtttttttgtttttagcagttataggcttttaaggtcagattaatctttatttaatttcttaataatcttataggattcagatgtatttgtttcccattaattcatgagtagtggccacaccagtctttcctagacttgaatctcaagttgctttatttttctaatttgttatcatcatgcctctctttcagcacagtagcagctactatgaggctatttggaataatgagcttggtttgaaaagtagcatcattaatctgatatatgctactgggctgaattatttgaattcataatgggctattgtctctcaaagacttttgcaggcttattttatgctttttggactccagaatcaattgactttttcaactctgtaatgtcctaactttcatttctgcttgcacactggacaatgctttttttcaggaacacatctctttcttgtaatatctttgtaaaagcagcgtggagcagccagcacacaatgccattttagctcttccctagagcttcagactcaataggtactagatctaccttatgagttatggcagagcacaattttaccaaaagtctttcagtgtaaagacacagatccacatgggtgtctctgattgacagttggctttgtctatttggtgagtaggatatccaagctcatttcatttagtggctgtattgtcccctaggaacttattataacttaacgtttatctcatggaaggttgaagtatggggaacccaattcatatgagaaatagcccaggagttacattctcttctgctcagtgaccattagtggaaatgtaaatatctcacctcaatgcagtgtgggttaggaaatgtggctttctgtctagtcaacctctttttcctatgctgtggaaagaggagaagtattctgagggacagctagttctatctgcagtgtatcttttttaaacagcatagaactattttttttttttaattctagtcttggtttctgcctttcaatgtgtgaatttaagttcatgtttcttttgatgactgataaatttgaaataatttctgtatttcattgtgttttcttcactaccaagtttttcttatttttaaacttttctgagcatatatatgtatattttttgagacagagtctcagtgtcacccaggctggaatgcagtggcttgatctcggctcactgcaaactctgcctcctgagttcaagcaatcctcccacctcagcctcccaagtagctgcattaaatacgtgtgccaccaggcccggccaatttttgtatttttagtagagatggaatttcaccatgttggccaggctggtcttgaactcctgacctcaagtggtctgcccgccttggcctcccacagtgtggggattataggcgtgagccattatgcctggccaccaggcatattttggaattgatagaatttctttttatctgagttactccatacatcattttttctccctgttgctcatttggaagctaatgattctttcctccctttcttcctttctgtctttctctgttttcctctctccctgttagtcttgaaagtcttacgtacatgtttaaattttttcttagagtatcaagttatttaatgtctatcattctaatcaacaaagccagaccatgcatgatttaatggatcagtgaaatccttccccccataaaacaaacttcacttgttagtgttgttttagttgcttcttaaattcattttcagtataatttatttggtcctgtagctactccaaatgacgcacaaaatttggctaaactgatgactctttttgtgtttatggtgttttgagtcctcaactttttctgtcttgaatttttttttttttttttttttttttaaggcagagtttctgtctgtcgcccaggctggagtgcagtggcgcgatcttggctcactgcaagctccgcctcctcggttcatgccattctcctgcctcagcctcccgagtagctggaactacaggtgcccgccaccaggcctggctaattttttttgtattattagtagagatggggtttcaccgtgttagccaggatggtcttgatctcctgwccttgtggtycgtctgcctcggcctcccaaagtgctaagattacaggcacgagtctccgcacccggccctgtttttgcatttttagtagagacgggttttcaccaggttggccagcctggtctcaaactgttgaccttaggtgatctgcctacctcsgcctcccaaagtgctgggataacaggcgtgagcmactgcgcctgtctacattttctgtctttactggtattatggygggaacccataaaccactgcgaggcagataccattttaagcaggaaaccttatttttttcygaagcacatttaaaaatattttccagtttatctattaaacatcctcctttgcttctggagatcctctgaaagatttatctctttcgattcatctgtaaagtaaaaataaccgtcgtcgtcatttctcaagcgtgacgatactgttacacgtttactgcatattstgcataccaagcacatatccgtcacaygcagtgtggccaacttccgagaggccggcattcagccaaacagcctgaagaaccaggagaaatgcctgagtttccaaatggcttatggtaagttgttgctgccactatgagtagcctacttgcatttctayttaatggcttttccccatatttgatggtatgttaaacagtcaatcattcattttctaaattaaagcctgtcctgaaaacgtgctcagtgctattgactgtgcatcaggtattagagacacagatatgaaactgtactttttaatttacgataaatgtcagtgtgaattattggttgttttgcttttctttcatagtctccgtaggcttcttgggaatggaaattggtataacctttttggaggaccctcagtaaaaagctatcaaaatttaaaatgtgggtatctcttgacctagtgagtctacttccaggaattcatcttaaagaaaaaaattatagtttcctaagtatttgtattgcagcattgctttcagtggccaacaaaacaaaacaaaacaaaattggaaacaacataaaataatattaccggagaaacaatgagtaacatgtataggattttttttttttttttttgacggagtcttgctctgttgcccaggctccagtgcagtggygtgatgttggctcactgcaactccgcatcctggtttcaagtggttcttctgcctcagccttccaattagcggggactaccagcgcatgtcaccatgcctggctaatttttgtatttttgtagagatggggtttcaccatcatggccaggctgttctcgaactcctgacctcaagtgatccacccgcttcagcctcccaaagtgctgggattacaggcatgagccaccacgcccagccgcttctcgtagatactacccaggaattttcacagtaacttcaaggaagagattgttctgtaatttctgtttttactgataaggaagctcacgcttagagaatgtaagtaaaaagttcacaaagctagtgaagtatgtgggggcggtttttaatgaatgattgaacattctttagtggaactacaatactatgtttttaggaaaagttgcacgatgtttttacatgggtagaaaatatactctggaaggatttgaaccaggctgtccctgttcttatcttggggcagtaggactttggggcacgttttcactttatatgttatcaacttctgtattatttgtaatacaatgaaccagttttatttttgcaactaacagtaagtataaatagctgatgaccacttggggtgaaccgaagtgcctatgacaaaccacacgcaggcatcctcgggactattgaggccagataatcctttgttatgggggctgttctgttcgttgtaagatattgagtagcatccctgacctctgccccctggatgccagttcactttccaacaagttgcaacaagcagaaatgtctgtagatattagcagatgtctgctagcagttagaatggcctctggttgagaatcagagcagactctgctcacactgggctatcagggtatagttctctccctcccaacagctggaactgagaccatctccctccatttgaggatcattccgatttcccaagtccaccgtgtggaatgtaaaatcctttgaaccagaacagacaaatcttgtttttgtctttttattgaatttaaccactattgacttgcgacttgcggcaatcaccagatcccagatctctgtgtttggagctacacgtcyttctgaatcgaggaggtggggcactgatttttcttttatcactgacttccccgaagtgggaagttccagtgcttaacaagtttcattaagaacacagctattaaatattcagaatatacagactgttgctgttgagaatgtaattatgcagtaaattagctgatgtccagtacgttgccttttaagcagatctttgatgtatgcagtacttgcataagatatagggcatgtttattaagagtcttcaactgtgtataaaactagagcagtcaaaagtaatggtgtctgctgaaggattctttatcatatgaatttacctttagtcatctattatttatttcagctattttatatgccattataataaatattatgacagagaaagcttttacgcttcaacttattgtactcctctttacttgcctgcaatccttcaggaaaatgtaaccacgctttacctatagttaacgtaaatcatcacttacattagaatgaaaaattcactatgaaaaaaagctcttacttcaatagcaaggcataaatgcacaatcatgttgactgccaacctcctgtgtcattcactgtccttccttaaactgtttttaagctgcaaagtgaatatattgcatagagggaaataggaaggttttggattattttcgctctcttattagtttctggcaggataagcattttttatccggattgcaaaatattgccaattactgtctaagcatttttaatagttttgctttccatggcacgcaactcatatactaaattaaataagctgttatctggtgcaatttctccttgaatagactcagaattacctatagatattgacacggttattttataaattgagttccagcaacacaaggcaaaaattttggcctgtatgtaatgaaggaagagttgtcatcattttcttattagggatgtttgtgtattttggcagggggaggtaggaaggggacctgatggagggccctggagtgaaggttgatgctggatggttgatttgaaggttaggaatggcaaactcagcctctgttcttcaagaatccccctgcgtccccccgccctgccccctgcccaaaaaaaaggaaatccagggctttgctagggatcatttttggtgtggttctgtattttaaaatgtggaatcatctccaaaagtgtttgtttattaaaagcaaagtgataaaatgtgtcaagtcagtgaagagactctcaaactcccctttcctgcgaatcctatcagaaagaacatttatgagggcatacttttcatctttaggcttggcaaagatgggtcaaactccccatcagactggcacatggtgctgtttcaggtttgactaagagagaaaagaatcactagtcaatgaaagcaactgtgtccccatgcattttcccagtgaagatgcgatcaccccattgccaccgttaccattgcttaaataatattagaggaattagtgttatgaagtcccacatatgatattgatgaattattaaaccagttgagttagatttctattgtagttcagtgaataatgtcatgtcaatactgtgctcaacgccagtgtctcttgctgttgtaaatgtgacagctcctatttaaggttttagaacataaaatcaggactgagagtatgtaaagcggaagggtgagagacatcagcataatgcaattaaggcccattggattagaatttgcaggatgccattagcaataagctctgagtgtagattattgccgtgcttacattttctccttcagcggtaacacttctcttgtaaattctaactgggtaaaataaatatgatataaaacagacacaaataagaatatatagatgatgttaatttcttcagagcttcccggtgttacgtcttcaagaatatgaygacaggggaacagcccagtgtggcagtcatgtgacgacatgagcattggaaccagccacatctcagttggcaacacgtatctgtgtcttactagcttggccactgtcacgtcactcagcctctgttttctmatctgtaaaatggggaaaattatagatgcttcagaagatatttgctatcactattaaatgaaaacaagcatgtcatcagtgcttattatttttgttgcttttatgatcaataaatacatgcaaattagagctttttaaatgagattctggaaataagtttttccgtatgtgtaagggaggggtagatacactgccatccaatcagcatcaatgggtaccttgaagtgagatcacaaaatagctaattccctgtaaacagcaacccttctctctgcagttgcacatgagtagtcccccagttaaaagagaatttcctccagatacaatggaggccacgttcaacacagccatctagtgtacctgggcttcttccacctccagccactgtaccgacgtgttcctttatttcacccacatagtgatgatgcttccaacacagcataacaaagagctgctgctttgtgctgctagatttgccaaaagtctgtgccagggattcttttgttggaggtaagtggagaacgcaaggcccacatgcacaagatgggagtattttgaagcatgctccgtaagacccaacatgtgggcagcagaccaactacttgggttcactatggcgagaaatgggataggagagcgaactcactgataccctcccagctaattcctaggcaatctgcaattaacaatgattgtaaagtaataatttgtggttttgaaaactaggtttgatcactggaattattcctgtcctatgttctaaaggcctgttgccttgagatgttttttctcctcccattattggtaagcataatgtaggcatgagacgttgcctttgaagtgtcggaaggatggagaggagaaaagaaaacggagattgaatctggaaaacgcattcatctttagaggcagtgttaatgaatacatgaatttagtcctgtaaatgttttctcccttatttgggacttggtgtattgaaggtgtctgttaactgtgctaccaatgagtgcccctgtatccgagggaaactggagaagtgtacttgggctaccgggttaccaagagcaggacagcatgaggcagttacagatctgatggtttttcttggtctttgtctcagctgccatgagggcttctaaggggcaaggagggttgggggatgagaggacaggtacatagtgtggacataatggaatatggaatagcaattgaaatcttgcgttgggctgaatcatggctttgcagttattatcttgatgcggctgtgcatgagccttttgaacctcagcttctccatctgtgaaataggtggataatgactgcaccctgcgaagatgctatagggataaataactgctgtggggcaaggactgaaatggttgttgttttgagatggcttttatcattgggccagtgacgacccattcagccctatcagtgaagagtgaagcactgcactctttaaggatagggctgaatggtttatcacccattcagcggtgaccaccacatcttatgcattgtgatgatcacgatgataaaacaatacataatcacaatataaggatctagagttatgaactactgatcaggtatcatgttctgctccaactgctttagatacattgcctgacttcccgatagggcaggtgctgttattactcccacttcacagaggagcaaactaaatatacaagaagcagtaacttgcccagccccaaaccaccccctgaaaaaagaaaacaagggagacccacagttattaatatgcattattattggaaaacaatggtcatcacattttagcagtggccttcaaaataatgataatagcatatattgagagcccattgtgtggcttgtaccttatattcactctatctaatcttcactctaaccatagaaggcaatactattatgctcattcataattaaggcaattgaagcccagacccttccagtagctttcctgaagtcaagttgccagtgcattggacatactrggctgtagttccagggcagcctggctctggtgtctttgctgcaatgacaatatctccccatttctctgtttaaataccacacactccccatatggtttctttggtttcaggcagtatcgcatcagagtcacatatggctaatttatagtcataaaatgatattagagatcactgttgcataacaacaagaaacccctttgattccacacttacagactcttgagtcactaacacaggtttcagtatatataaagaatagatgaagaagacttagtgtattaaggtggcagtgaactgtgctactgatgagtgccactatattcaagggaaatgggagacatgcacctgggttgtttgattatgaccttctggctgagccctggatgttgggagcaagtgggcttctgagctacatagaagttgcctgatgcttcacatgtgggatgccacctgtgtggctctgttttaaaatgatgggtagtagagtctgtatacataatttaaaatacattaacatttctgttttgcctgagataagcttgtactggtgtgatcagaaggaagaatgaggatttggggaaggaaaattttgagagccattttacagcatttcaagattcagtgatctcagaacctcttttggttaaacaagcatgggargatggatgattggatggatggatgaatggataggtaggtgggaagataaatggatagacatataggtaggaaggaatgagggatatatggaaggctagcagtttattttacggtggtgggatttttttcttttccttttttactcagacagtcttgttctgttgcccaggctggagtgcagtggcacgatcatgtctcacggcagcctcgactttccaggttcaagtgatcttcctgccgcagcctcctgtgtagcaggtgcatgctgctatgcccagccagttatattttagatgcttttttatatggcccatattcatatgtctttgtgacttttttttataatggatgtgagtgtgaagtaggagttggcctgaaacaagcccagagaggtagacagggaccaagtcatggactgagttagttgttgttgttcctcactttctgtttttatttctcctctttctggacacatagcacgttgcaccttctagaagctaggcacagccacatgactttgtcaagggaaatgtgagcagaagcaacaccagtcactattaagtgggaagtctttgagatgccacgtgtaannnnnnnnnnnnnnnnnnnnnnnnnnnnnnnnnnnnnnnnnnnnnnnnnnnnnnnnnnnnnnnnnnnnnnnnnnnnnnnnnnnnnnnnnnnnnnnnnnnnnnnnnnnnnnnnnnnnnnnnnnnnnnnnnnnnnnnnnnnnnnnnnnnnnnnnnnnnnnnnnnnnnnnnnnnnnnnnnnnnnnnnnnnnnnnnnnnnnnnnnnnnnnnnnnnnnnnnnnnnnnnnnnnnnnnnnnnnnnnnnnnnnnnnnnnnnnnnnnnnnnnnnnnnnnnnnnnnnnnnnnnnnnnnnnnnnnnnnnnnnnnnnnnnnnnnnnnnnnnnnnnnnnnnnnnnnnnnnnnnnnnnnnnnnnnnnnnnnnnnnnnnnnnnnnnnnnnnnnnnnnnnnnnnnnnnnnnnnnnnnnnnnnnnnnnnnnnnnnnnnnnnnnnnnnnnnnnnnnnnnnnnnnnnnnnnnnnnnnnnnnnnnnnnnnnnnnnnnnnnnnnnnnnnnnnnnnnnnnnnnnnnnnnnnnnnnnnnnnnnnnnnnnnnnnnnnnnnnnnnnnnnnnnnnnnnnnnnnnnnnnnnnnnnnnnnnnnnnnnnnnnnnnnnnnnnnnnnnnnnnnnnnnnnnnnnnnnnnnnnnnnnnnnnnnnnnnnnnnnnnnnnnnnnnnnnnnnnnnnnnnnnnnnnnnnnnnnnnnnnnnnnnnnnnnnnnnnnnnnnnnnnnnnnnnnnnnnnnnnnnnnnnnnnnnnnnnnnnnnnnnnnnnnnnnnnnnnnnnnnnnnnnnnnnnnnnnnnnnnnnnnnnnnnnnnnnnnnnnnnnnnnnnnnnnnnnnnnnnnnnnnnnnnnnnnnnnnnnnnnnnnnnnnnnnnnnnnnnnnnnnnnnnnnnnnnnnnnnnnnnnnnnnnnnnnnnnnnnnnnnnnnnnnnnnnnnnnnnnnnnnnnnnnnnnnnnnnnnnnnnnnnnnnnnnnnnnnnnnnnnnnnnnnnnnnnnnnnnnnnnnnnnnnnnnnnnnnnnnnnnnnnnnnnnnnnnnnnnnnnnnnnnnnnnnnnnnnnnnnnnnnnnnnnnnnnnnnnnnnnnnnnnnnnnnnnnnnnnnnnnnnnnnnnnnnnnnnnnnnnnnnnnnnnnnnnnnnnnnnnnnnnnnnnnnnnnnnnnnnnnnnnnnnnnnnnnnnnnnnnnnnnnnnnnnnnnnnnnnnnnnnnnnnnnnnnnnnnnnnnnnnnnnnnnnnnnnnnnnnnnnnnnnnnnnnnnnnnnnnnnnnnnnnnnnnnnnnnnnnnnnnnnnnnnnnnnnnnnnnnnnnnnnnnnnnnnnnnnnnnnnnnnnnnnnnnnnnnnnnnnnnnnnnnnnnnnnnnnnnnnnnnnnnnnnnnnnnnnnnnnnnnnnnnnnnnnnnnnnnnnnnnnnnnnnnnnnnnnnnnnnnnnnnnnnnnnnnnnnnnnnnnnnnnnnnnnnnnnnnnnnnnnnnnnnnnnnnnnnnnnnnnnnnnnnnnnnnnnnnnnnnnnnnnnnnnnnnnnnnnnnnnnnnnnnnnnnnnnnnnnnnnnnnnnnnnnnnnnnnnnnnnnnnnnnnnnnnnnnnnnnnnnnnnnnnnnnnnnnnnnnnnnnnnnnnnnnnnnnnnnnnnnnnnnnnnnnnnnnnnnnnnnnnnnnnnnnnnnnnnnnnnnnnnnnnnnnnnnnnnnnnnnnnnnnnnnnnnnnnnnnnnnnnnnnnnnnnnnnnnnnnnnnnnnnnnnnnnnnnnnnnnnnnnnnnnnnnnnnnnnnnnnnnnnnnnnnnnnnnnnnnnnnnnnnnnnnnnnnnnnnnnnnnnnnnnnnnnnnnnnnnnnnnnnnnnnnnnnnnnnnnnnnnnnnnnnnnnnnnnnnnnnnnnnnnnnnnnnnnnnnnnnnnnnnnnnnnnnnnnnnnnnnnnnnnnnnnnnnnnnnnnnnnnnnnnnnnnnnnnnnnnnnnnnnnnnnnnnnnnnnnnnnnnnnnnnnnnnnnnnnnnnnnnnnnnnnnnnnnnnnnnnnnnnnnnnnnnnnnnnnnnnnnnnnnnnnnnnnnnnnnnnnnnnnnnnnnnnnnnnnnnnnnnnnnnnnnnnnnnnnnnnnnnnnnnnnnnnnnnnnnnnnnnnnnnnnnnnnnnnnnnnnnnnnnnnnnnnnnnnnnnnnnnnnnnnnnnnnnnnnnnnnnnnnnnnnnnnnnnnnnnnnnnnnnnnnnnnnnnnnnnnnnnnnnnnnnnnnnnnnnnnnnnnnnnnnnnnnnnnnnnnnnnnnnnnnnnnnnnnnnnnnnnnnnnnnnnnnnnnnnnnnnnnnnnnnnnnnnnnnnnnnnnnnnnnnnnnnnnnnnnnnnnnnnnnnnnnnnnnnnnnnnnnnnnnnnnnnnnnnnnnnnnnnnnnnnnnnnnnnnnnnnnnnnnnnnnnnnnnnnnnnnnnnnnnnnnnnnnnnnnnnnnnnnnnnnnnnnnnnnnnnnnnnnnnnnnnnnnnnnnnnnnnnnnnnnnnnnnnnnnnnnnnnnnnnnnnnnnnnnnnnnnnnnnnnnnnnnnnnnnnnnnnnnnnnnnnnnnnnnnnnnnnnnnnnnnnnnnnnnnnnnnnnnnnnnnnnnnnnnnnnnnnnnnnnnnnnnnnnnnnnnnnnnnnnnnnnnnnnnnnnnnnnnnnnnnnnnnnnnnnnnnnnnnnnnnnnnnnnnnnnnnnnnnnnnnnnnnnnnnnnnnnnnnnnnnnnnnnnnnnnnnnnnnnnnnnnnnnnnnnnnnnnnnnnnnnnnnnnnnnnnnnnnnnnnnnnnnnnnnnnnnnnnnnnnnnnnnnnnnnnnnnnnnnnnnnnnnnnnnnnnnnnnnnnnnnnnnnntcagctgggcgacagagtgagactccatctaaacacacacacacacacacacacacacacacacacacacaaaagcacagggctttgttagcaggcatgacttggattctttaggatccttccctcagtaatctggtctgatgtggccttcagggaggatctttggacatcattgccatccatctgtccactgtgctggactataacccacccagactaccatttattgccaagtggcatcgggacaagagttttacacaagaaacatcttctctgctagttaaattaattagataatttgtcttccagacaggatgttaggaacttatgaacatgtatcgttacaaacctatgagtagatgactaatattcatcttttacagataaggaaactgaggctcaacagtgttaaatggtccagaatgagtgtgttttctagctgtcactgcctgatgtttactgctcaaagcttaggacttggattagagcccaggacttggcagccaagataaaccagstgcaattacgctgaacatctcagcccagctcctgtccatccctgaacaggacacttagggtagaggatgttctcagcagtgccatttgcatcccccttcatagccttacaggtatcatgttatcctccttaatcttacttaagcatcacagtctagactagaattcccaagtcaaccgtttgttttacgggactcttcttatttgaataggcaggtggccctgtgttcttggcttttttgtcctttcaaggagctaggtctaagaagtgatagtatttaatctcgcactccgaagcgcacccagatttaaaagttgggagtggcccatacacagaaggctagtgggaggggcaacccggagatttgtccttgcagaatgatgccatgaagaacatggccaatggaacaccattgcttcaaatcccgacctctccagttctcctggtttcttgttaggcgggaacttgggcttctttatcagtgactggggtcagttcttgtactcaacttcctatctctgtgatctcttgtaagatgctgcattgtcaaatggagaaaacattgtctttgagttgttaggagccttgagtgagatggtatgcaaatgtccagcccgtggcaggccctaagtacacagtagccattattaccattattattcctatcaccagcatgtattccacctgttgatagagttttctgggtttactaagccagggtgttgcctttgggatcgaggtccgtcagaatccattggtataaacgagtctttctgcttttgtactttctataaaggagttgtctttgatttttgatgcaggtttaatggagatatttcagaacctggatggcagcttttgaaattaagatattgtccattgcatctttccatgatcgaggcgttgtcgtgcattcccctccttacagcgttttaggatgcagattgagaggagataacgttagcccgaagcgcctttgcagcctcttttgcgcggctgaaacacagcacaacccacccccccgccccaccccccagcctgtaggtttagcagaatcccagcctcacatcctccccgaacttggcagtaaaagccctgttcttccattcattccgatgatttatattctctctgggcrtcttatattaaacaggggaattccgacatgttccataacacatttactgtaacttgataccatgaactacacttgctgttatttatcatttctttttattttctctcattgcagcataaagccaaggtagaarcaatgaccctggacctcgctctgctccgtagcgtgcagcattttgctgaagcattcaaggccaagaatgtgtgagtgttccagtggagggttatagatcataatttyttgctattgtaatatctttatcagatgaacacaattgggagaatgcaaggctgttgtgttgtcttggcgtccaaacaggaggctcatttatattggccctgttaaggtgaaccgtattttcttgactcacagtcaccttcattatgagatgtgtcatcaatctaataacagcttcccacataccaaaagagaagacactattaaagcactagtaaaagtggctaataaaagcttggcaatagtaagatgcatcctgattataagattttttgtagtgcatttcagaatggagtaagagtatatttaaattgcattcaggaacaagtaaactcagttatccagtatggcagggaggttgacaatccaagcacccaaaagacctctagtttctaaagccttcgatgatttgatgtggtacatggatgtggttccaaaaaacatggactcacattccttttatttattttttttcatccttttcagtctttcaaaattccagttggagaaagccttagttagggcctagcatattttgatcctatcatatgctagcatccctttctaacagagaaggttgtaggagaaagggagagaagcggaagggggtggggagacagagagacagacaggaggcctcaaaccctgaaacactgagctaaggaaagtgatcatggcaagctacactaattacaatactttgtttccaagtgtttatttttactcatatttagggcaggcaatcctggtttctcgttgaacatagaggtttgaatttcattaataaataacttcatttattttttttcagtgacttgattcaaacatgaggattaagttaataatagcacaggttgtgcgaaggataagataattacacaagaggcaccagaaccactgaatgtggagagctctcataaatgacaagctgcctttgggttaggctctgttgggaacattagttctgcagtgttgcaagcagatgaaggatgtgagggaagggatcttaaaccagatattcaaatggccctgtggggagctgacaccacactgctgtctagtgtccaattctccttgcatggctgtgtcacccaggttggaacgtagtgcacaatctcgccttaatgcaacgtcccactgcgggcccaagtgattttcctgtcccagcctcctgagtagctgggactacagatgcctgccaccatggcctgctaatttttgtatttttagtagacatagggtttcaccatattggtcagactggtctcaaactcctggcctcaggtgatccacccgcctcagcctctgaaaatgctgggattacacacatgaaccactgcgcccagccgctctactttattagatttaaaaagtttgctctcagctgggtgcagtggcttatgcctgtaatcccagcagtttgggaggccaaggcggggagggtcatgaggtcaagagatcaagaccatcctggccaacattgtgaaaccccatctctactaaagatacaaaaaattagctgggtgtagtggtgcacacctctagtcctagctacttgggaggctgaggcaggaaaatcgcttgaacctgggaggcagaggttgcagtgagccaagatggcaccactgcactccagcctggcgacagattgagactccgtctcaaaaaaaaaaaaaaaaaaaaaaaagtttgtactcagcctggcgtggtggctcacgcctgtaatcccagcactttgtgaggccgaggtgggcggatcacctgaagtcaggagttcgagaccagcctgggcaacaaggtaaaaccccgtctctactaaaaatgcaaaattaactgggcggggaggcacatgcctgaaatcccaactacttgggaggctgaggcaggagaatggcttgaacccgggaggtggaggttgcagtgagctgagactgaaccagtgcactccagcccgggtgacaagagcaaaactctgtctcaaaaaaaaaaaaaaaaaattgactcaggctcttgctggagtatgtcagtgtcccaagtcattgaggtctacattagagtcagtcttagtgagagttgcaacatcgcctaagcgcagaccccaagctggcttgtaggaacagtgagataacatcccccagccagccagatctgagagagccctcctgtgtgtgtcctttgcagcgcttggctgttagtagcttccaccctttgccagaactatcaagaggcacctcaacaggctgcaacactagcattcaagacatttgttcgctgatttgcttcgtcattcatttatccaccggttccttcacttcacacacatttcaggagcacctctaaagccccagacattcttctgggctctgagaagagagtggtggccctggaagccacagtaaccgcacacaagctgtcacctcagttgtcagctattatggatggctgactcctcaaactcatctgtctgtggttgtttgggagggaatgataatgacaagaacagcagcggagtcagcagctcatttactgagggcttatgggccatacgtggaaaatattttgcatgtacgttttgattcaattctcaaagcagtccttgggagtagatgctattaatatctctactatacagataaggaaagtgaggctagagaggatatataatttatccaaggcatgtggaatgtgggtagaggggccgatttagcctcttcacggctccaacttgaccaccgtactatactgtgtttcattttagtttattttttatttattttttgagacagggtctcgctgtgttgcccaggctgaagtgcagtggtgcaatctctgttcattgcaacctctggccttgggttcaagcgattctcatgcctcatcctccagagtagctgggattacaggtgcaggttaccacacacagctaatttttgtattttctgtagagatgaggtttcaccatgttggccaggctagtcaactcctgacctcaagtgatctctccaccttggcctcccaaactgctggaattacaggcgtgagccaccctgcccgaccctttcattttaaatgtgatagaaacagactcagagaatgtgagtgactttcgcagggtcacttagcaggttggtgacgggcatggggtttcactccagtctgcctcttgttcttttcctcatagcatgtgagatctcacaattcactgccgctgaataactttgtccagttcctctgtcagaatgtgttggaagtgagcagctttgctgaagagagccaactgttacataataggatcatcttccacgtcttaactggaccattagtttttaaccattaagtagttgggaaatcatcaagttcaagtgccttttgtaatcaccaagctcaaaaccttggaggaaactctcacccattttgccctaatcccagattttagcacaggactttggaattttagaaagtacttctaggttgagaaacaagggtgattttccatatagagacctctgtagcacaaccctctttgtatgtgtcccatgagagtacaggattttacatggcttagagaaatactgtggtggtgaaaatatgcataaaaaagcgagagattttacttttgaaatgctgccaaagtgaaatctctyttggataggcagatgacagtttagtacttgcaggtctttcgattctgacaactgtcagaagtgaatttaagtgctggtgactaggctgccagagaaacacatgtaactctattcttatcaccccccatcttcagacattaaaattttcttgtgtgtaaaacataatgacaaatgaaagaaaggctgccagttcagaaccaatctcttttcacgctgttgcattgaggagaggaaaaaatcccttaaatttgaattccatgtggatgctcttatttaatatgccgtttcaaagcctgtatgcgatcaagccagagtattatcaggctctgagttcctgtgtgtattcccttggtccatgctccatctcaagtgtttctccacactgggataggcagcatattgtgtagtcttagagcagaaaaggtagaaacagattcttagtacaaacactggtgagaaaagcagcatattgtactgtggaaccacccgccgtctgccttctgtgggagatggggatcagcctcttcctggatctcttctttttattcgggtgctgggaggtgaggctgcaaaggaggctgttgtagagggagccctcctaaccatgattatgtaaacaatagctgctaggcaacttgttgtttgttttatgcaaggcagtgtgctaagcacttacatacatgtattctgtctgtagtttgttataagagtcctgcacacttaaccatgattatccctactttgcaaattacaaggttgcagtgcagagagcctaagacactttctcaacttgagcaagtaggagatccagaatttgaacccaaatctctctgaatccaaaacgactttttgttactttgcacacttcagtcataggaatttcagtgtggatttctgtattggttatgtattgccgagtaagaaatgactctggccaggcacggtggctcacacatgtaatcccagcacctggggaggccgcagtgggtggattgcttgaggccaggagtttgagaacagcctggccaacatggcaaaaccccgtctgtactaaaaatacaaaaattagccgggcatggtgatgcatacctgaagtcccagctactcaggaggctgaggcatgagaattgcttgagctctggggtgggcagaggttgcagtgagccgagatcatgcctgggggacagtgagactctgtctcaaacaaattactccaaaatttagtggctaaaaaacaacataaaacaagaaacatttctgttgtgcctcctcttttcctccctccctctttctcatagttaatttgtttgaatcaggattcaaataaggtcgatgcatttttaatctataggttttgtctcctttttttttttttccttaaaaaaatttcttttaatgcaacagatttaagggaccagggtgttctctagagcaggggtccatgacctctaggccacaaaccaatagcggagccgtggcctgttataaattgggtggcatggcagggagtgagtggtgggcaagcataggaagctgcgtctgtgcttagagccgctctctgtcactctcattagtgcctcaggtcctccccctgtcagatcagcaacagcattagtctcataggaccgtgatccctattgtgagccacacatgcaagggatctaggctgcatgctccttacgaaaatctaatgcctgatgatctgtcactgcctcccatcaccttcaagatgggatygtctagttstaggaaaacaagctcagggctcccaccgattgtacattatggtgagttggataactatttcattatatattacaacgtaataataatagaaataaagtgcacaataaatgtcatgtgcttgaatcgtcccaaagccacccccactcctttgagtctatggaaaaattgtcttccagaaaaccacttgctggtgccaaaaaaatttggaaacctctgctctagagatttctgcagtctgtactttggtgattgcatctctgtggtgtcttttaacatactcttctgtctcctgagtttcctgtgaaagggtagataactcaagagactcaatcaacttcgtgtttaatgttttcgtaagaatacttcagaggcagtggtgtaatcgtccaagagtacacacaggcctgatygccaaagccagttttcttcaggcccagcacgtcctgacctcctcactcctctgcccactctctgtttactcactccsattttcattcattgattctgttattctccactaagttttctgggtggtcagcccaggaagcctcagcctgcttccagatagttctcctcagagttagcggtagcagcggtcgtcggccagtgtgtctcgggtcaaattattttgggcattactggaaagttccaaaccaaagcctgtggtaagttccacccaaactggcttgtgagggatatttttgtttaaactgcattcctggagaggagccagacttcctactgcctggcagcagtggtgtccataggagtatgaagagctgggaccctttctaatcactcagaccaaatattggggttttctgaaatggactgagaaataacagtatgtttttatgaggctttgcacattttccttcctagcagtagctgcttagtctactgaaaagtgcatattttgaacagggcctagaagagttaacagctcctagagagaggtgctctgtaatactttttcttcttcaaaaaatggtttatggctgggcgcaatggttcatgcctataatcccagcgcttttgggaggccaaggtgagaggattgcttaagcccagaaacgtgagaccagcctgggcaacgtagtgagacgctgtctctgtattacaaaattttttaaaaaacggtttgtaggtccttaagtccctgataaaatagagaactgaattgcaatcctggaacttaaaaagttggtgacgacacctgagatatttattacttagattgcagttactggtcagcttgtataatactgaccaagggttttgattcttcctggaattgataggaaattcatattaaaataattacccaagtccaaacatttttagaactgcatttttgatcatggatttttatgtctcttctgaactttctgtcaccggtataatttaaagaaattatacttaagctttgtctcacttagaagataatatagaacagtggtgtttttttaattaaaaaaaargttaaaatracggttttgtatccttgctttacttcttaaacatatgggaggaaaaaaaatctttaacaagtttatttattttcattttctgctaaattactttcagaacttgaatctactaatcccagatataatattcttggattcatattccaaattttgctgtctcaaatccatctagggaagtgggtgggctataaattataaataaattccaaattttgtgggatgaattaccctgaagaccaacgtgtaaattacatattaatctttctttttctccctagctcggttttaagaataatgttttagccaacatatctgcattactcttggctcaayatgagaaatccatttttggtttgcctaacagaagatcatgttgctttgcttctctacacagtatgaaaacccaaagaaaagaaaaacagaggcagttttttgctctaatgaatgctctaaatctagctcttaattatgattttttaaggaaaattttgaaaagtctacaagttaaatttttttttctatcccatacattttccatcctaaggcattgaaaaagcacactgtgaaatacttagtgtatctagaaacatcagggaagaatgcttccctcctaagcaaaattttgccttctgaaactttttcagcattcagtctttttatataatacttagaaaaatatttctgaaatagatcatacactctcttcccaaaaacatcaaagtatgaccgtaaagggcagaggtaggtaaacttcttgtaaggggccagagagtgaatatttgagaattttcagactattaagatctctgttgcaactgcttgcttttgccgtggtagcctgaaagcagccgtagatagtatggaaatggatgatcatggcagtgttgcaataaaactttacaaaacagacaatgggccagattggccaggggccatagtatgctacccctgggcaacaacctgtatgccctggagtagtgtaaagaacgtgggtgttgggggtcaactgacgcttccagctctaccacttactggctgtgtggctttgggcaaactactgaaaatctctcagcgtcactttccaagtgtgtgtaatgtgtattttcacagtgctttgcaggttgttgattattgaaaatagccataatgcatgaaattaccagacacatctcactttatggagcctggggctattggtaatatgcatttctttctcatcttgatcgtaaaatgatcttagaaaggtttctgagaatwtatagagtttaagacagcaataagacaactaattaattaaacaggaaaaggggatgttgtgctcagagaggaagtgtgggtctcataagggctttcacaatcgtttgagaggacacgtgtgatgtctcatgcctgttatcccagcactttgggaggccaaggcaggcaggttgcttgagttccggagtttgagaccagcctcggtaatttggcaaaaccttgtctctacaaaaattacagaaattagttgggtgtggtggtgcacacctgtagtcccagctgcttgggaggctgacgagtaaggatcacttgagccagcatggtggaggctgccatgatcatgctactgcactccagcctgggcarcagagccagaacctgtcttgtaaagaaaaggaaaaagagagagaagggcagaaagaaagaagggaaggaagaaaggaaaattgggcccaggaatgatctttacaatgcctgacaaccaagagaagaagggaaatgagcttcacattgcctgcaagctctarggtgacaagagccaagagaaattattgttactgtagtgatgttccactgaggatcataaagtactttattactctactgagtatggttattggatatgtgttcttctttttctttttctttatcttttttgctattcttttgttattcttgatttatgctgatggaaagccatggacccaaggatgcttcacagttttctttcggagtaaatgcttagattccattttctttgacatgactatgtctgttcctcttgattttaggcatctttttcagatgagttgccataaaagcagcctgctctggataagtgaggtacagcaggacacactgcaaatactaggaatccttaagtacagtggaaccccagagcactctacctgctttctttctcacctccttaaaaactttttttgcccwcacctcatcatttattcagcagtcacaacagtgccaagaacttggctagagattggaaataaagcttatgccttctctcatatctcctgtaccttatttctttcttacagtagttgtgatgcttagcagttttttgataactttttataatgccaaccttcaaaaacctgcccctggtggagagaataattattacatcaattaggggtcacttagcatgacatttgtcggaaaaaaaaaagttagtgagcctttttgccatattaaaagtcatcactgccaagacataaatgaaaatgtgttcgaattaaccacaccaatgttcacaaaataaacatttttgatttcccaacagaatcctaggtttaactatcactatcatctttcatgaaatcaaagtcatatatgtaaattgaacacaactttcccttccatagagagtaaaaaccacgctttggagggtagatacaattaccccagggttgtcttttcccactcctcacaatcccaccagtgcacatgcaaggtgatgtccttcctttagctatagcaaataatgttaattattgttggtgttaaataatgattatgtaaagcactagactagacattcgtcggcaaagtttttctgcaaagaatcagatagtaaatatttttgctcttatcagccagacagtctctgcggcaaccattcaagcattgttgaatacattgttgagtgttacatgagactattgtaatataaaagtagcctgggacaacacataaataactgggtgtggctgtgtcctaataaaactttatttacaaagaacaggaagtggcttggatttggtatctggcctggcagctgtggtttactactccttrgacggtggcccagagaccctttaaatgaaattcaktttactagcaccctttttcatcatgagaaatatattctgtttttcttaraaaatgggttatgttaggtctggtcaaggtaaataagtgttgagagtcgatgttgtgtgcatagttaatttcaattctttgaagaarctcccccatgatatttcacggctgagagaagaggaaagagtttaagtggaacagtgtgctttgctgagctttggaaatattaccatatagggaagcaggtcaataagacaactaagtgctgtttcaataacgaagatactgaagcgctaattggagtatggaaccatataatgatgataataattgctaatatttatcagctatttatcatgtgtcatgtacagctaagcacttacataccatcccattttatccttataatgackctaagagtgggttaaaaaatggcagaagaatggcagtgtttaatggttcagcctggtgcaatgattaaccacattttacagactaagaaattaagaacctcaaccaagttcatgctagctggtacgcagtaaggctagaacttcgtccaaaatctcttcttctgttgagctcagcttgcatagtagcttggagaatcagaaagatctgtctcatttgggaaatataccatgtaaaaaacattgtttctaaaggagatttgtcccatgagtaaaatagatgatggacagccactgcctagtgggacaattagaaaggtcagttcaaggttggaggagatgcttctttcagccaattttcctttttctcaggatcacctcaggtgatccgcccacctcaacctcccaaactgctgggattataggcgtgagccaccgctcctggcctttcagccaattttctatcaccaaagggaaatcgttttgctggaatatgtgtaaaggaggttaaagtcagaagagattctcgtccgctcagttaaggtactcagactattttccaaccaatcaagagggtgctgcttcatggagttcgtttaagctgaagcggcagctgktgactgtcatttgcatcatctttatacatttactgtgaatgtcactgtccatttccactttctttctacttgtcttcaaattgatgcttatcaagtagacagaagaagaccaaggggtcgttttgctatttatacctccaaattgatggcgtgatcactctcaagtgcaaacccagccctgacactgtcctgtttggcaatgtcctgctatctgacctgcaaatagctacacttcctgctgtggcccacccaggcctctgggatctgatcccttctcccatgtcacctgtggccatgtcttccccaacccaggcttctctgctccgctgcttatgttctggatcctgactctgagcctttgcttgtgtggctcctctcccacttgtccatcatcatgtcagttatgtaagcatagattccaaagtgacaatgagggtagttaggatggcaagaggagaaaaaccaagctggattcatggattgcttgtgtcacgtcctctacagagcctcccttctacctgctcttacccgggcaccacagttgatgagttattttttggaccatcagcaacacacccaatcattgtacatggaatacttyggggatgcttttttctatattgattttacttcattaaactgagctccagaggagcagaaactttggctaatacatcttggtcttagcttgtaatatctgtgctacaacttattaagatggtgacgctggcaaattccttaatctttctaattcttaatttcatcagcaaagatgggaaaggatactaacaccactctgggttgttgagaggattcaataactgaatatttataaagcgtagtacctgatacttaataaaaaagtgaattttaacctgtgtcatcattgtcatcgtctttatcatcctttgcaattattacatttactgccttctagtacaaggaaggggatgggtggctggctggctaggtggatagaaggatggaagaggtaagtacaaggaaggggatgagtggctggctggctagatggatagaaagatggaacaggtaagtataaggaaggggataggtggctggctggctagatggatggaaggggtggaaggggatgcaagaggtaagtacaaggaaggggatgggtggctggctggctagatggatagaaggttggaagacaggaaggatggaacggaagaagagggaagaacaaaaatggaaacacatagtactgttaggtgaactgaacttctaaggtgccgattctcagtgatagaatcttgagttgatacctccttgggtggcatggagcctatacctttgtagatcttgggaaacaacttctaaagtaatcatagttgtatgtaatcgtagttacaacaatagttattttaggcacataacccaaaggttttcttacaaggaatctatgaaccttaagagtgagggcttctgttaagagtaagggcttccctggagtggacatggatcatgggactgagccagcttggcattgttgggttgaacagggagcgacacctctcagcccagtctatcaagcctgctctttgacctgcagtgagaccacccacgcagacatcaatgcagcaaatccccggcgtcagggtttcaacatttggttactctcagagaactctcgatttatataagacttggaaaaagggtttgagtttctgtggtttacaattatatttcccaacttggcccatgaatccagcttggtttttctcctcttagcatcctaaccaccctcattgtcactttggaatctacacttacataattgacatgttgagaagctgtgctaaaaccacactgaaatcacattttaataacatgggaaccatcttttcccagtaaattgttgagaagctaattcttgtcagcctaaaaacttgaatatacatttgaataaatcagcggtgctacaccgtggcagcctgctgaaaatccccaaggaagattatatttttagttgagctacttgtcactgcactgtgtttttaatattgtgagtcctttcttgtcttcatttttgaagaatctattgcataccttgtcattcagaaaaacataaacgggacctctcaattagcggtaaagttcgtcagtttaacttttaagcttaaactcctgttatagttcggtcacttactcgtcatcaaaaagatatttgagctgatattatgcaataatttataaccaaaaacaggaggaaaaggtctctgtttgtctcagaagtacaagttatgcataaggtgacaaattacacagctttgggaaatgggtcttaatggaatgcaccaggctaatagaaaagcagtgcctcgatttcccacctcagatctgaaaactcctgagagactgacagggcggttccccagcttggctgtgtgaggaatcagctgggaatcgaacactgcagtctggctgtcacccccaggattctaatgtaattgttctgcattgtggatcgatggatggatggatgaatggctggacagaaggaagacttggaaaaaatctttgagtttctgtggtttacaattttatttcccaacttggcccatgaatccagcttggtttttctcctcttaccatcctaaggagggagggagggaggaaaagggggaaggaagcaggtagaaagggaacagggaagggaggactggaggaaggaaagcagggatcattctggagtgtacactgggcatttgattttaaagcaaatccaagagatcattaaatttgtatcaatgaatacactgttacccctcaatcaacactacaattcatatatcagaatagcactttgttacttgtttctgagatagggctggctctgtcacccagactggtgtgcagtggcacgatcacagctcactatggcctcagccaccagggttcaagtgatccttccactcagcctcctgagtagttgggactacatgcctgcaccatcatgcctggctaatttttatttttgtagagacgaggtctccttgtgttgtccaggctggtctcaaacttctggaatcaagtgatcctcctgcccctgcctcccaaaatactgggattacaggcatgagccatgtccagctgccttgtttttttctttgaagagaatgatagaccttccataggaaaaatgttaaatatgtgtgtgcagaaataaagatttcaaatatttttgcaagatattttttctaataccacttttttctacattttccataatttagtgaagatagtaaattaacaaagtggaaaagactgaatattttaagaaaagccaagtttaaaaattttgaacctaatatttcttaaagtagctaaaattcagatattgagaataaattcaacttgacatggcaaaattctaataggctgaaataatgttttggtctagaactatgtagctttgtgtagcccatcaattgtctaaaaaaagagtaacctattttgatgaaactcgctgtatcttgtaacctgtatcctgtcttggtattgtgggagtatatatgatttaggggaaagagtctggagagaccttaagtctgctttagggaaagggtgaggaaccccactgaaggctacttaacgcattttgagaatgtcagtaaagatttctcagagcccagggattttttttttaattgagacataatttacatacaatacaattccttttttcttttttttgagacggagtcttgctctgtcgcccaggctggagtgtgatggtgtgatcttggctcactgcaacctctgcctcctgggttcaagtgattctcctgcctcagcctactgagtagctgggattacaggtgtgcgccaccacgcttggctaatttttgtatttttagtagacacggggtttcaccatgttggttaagctggtctcaaactcctgacctctagatccgcctgcctctgtaatcccaaagtgctgggattacaggcgtgagcccctatgcccagccaaaattcattattttaagctgtacaattgagtgatttttattacgttcacaaagttacgttaccattaccacttttgaattgcagaacaatttcatcactccaaaaagaaatctcataacaattagcagttattttccatcgctacttcctccagtcccaaggcaatcagcagtctgctttctatctcyacctgtttgcctattctggacatttcatatgagtggagttagataatacatggccttttgtgactggctttcacttagcataatgttctagaggttcatttatgttattgcaaaaatcagtacttcatttctttttatggctgaaaaaaattccattatgtagatgtgccatatttgtttatctggttgtcagtcggatatttctgttgttcctactttttggctactgtaaaagatgctgctatgaacattattgtgattattataccttatttgtaaacatcatgggtggggggttgcagtaaacatgttggaaagtagggttggaggtccgtagaaattgggggcttcagcacttcccccaagctcaacaccaaccccctttctgagcccctcttgaaggagagttccctgggacgtgcctggtattggtacaatcagtcaggaagcatttttcctggggagaaacttacaagtccacgatcaaagccaacaagagacaaggtgttacatgactcattttyggtttaagaagtgacaggctgattctaagttgggttcaattattttgttaaagcgttttgcttatttgacttctcctgacctcggaaataattctaaccaatcagtgctggctcccattggccctggggtctggttgctttacagctggtgacagggggaccactccactaccacatgtgaattaatcctcaactccagagccaagtgccattctccagcaaggttgtatttcttcattagctattcccagggcccagaaagtcccagaggatgtcagagtacattaatttttatcataacatggaatctttcaggtctgaatggcagcacacggctgtcaggggcttctgaactctattacagctccatatatctctaggcaaaacagaggaaagagtcgtcattggcaagggagatgtacaaaatgcatgagatgttttattttttgagtgacttgaccacgtgcttaagcacattccccaaacaatttttttcttattgtttgtaagttgtaagttgtaaattcacctctgccaccacctattaaagcccactccctgcattaaaactgtataaagtgtatttaaataaactctctttgcatgatgtgaatgaaatcgtcatctggtacttaaaactattctataaagttattaaaaaattaatgttcccttcccatgatttttctgcagaatttatgcatccatgatactgcagaagttcataaataatggcttgtattgctgctttagtattgctttatgcctacgaaatataatgttaatttgtagcaatgctaatgtgttttcaggaaggctctttgtttattgcctttattttccccacttaccaagtgggtaaaatgctttgagggttgcattttatgtattcaggaggcccaggtattattttaatagaagcactattgacaaataccagtcatcccccctgtgccaggccctggatgaggcactgcttcgcatgggggctccccagattgtcccacaaggaaagcatagtcaaagacaaagttttcagttgtaagagtaaatgtgttctgcctaggcattgtcaagtaatttactgccagctctagcccttcactcaagtttcctggatacttttgacttcttagccatggatgtgtttgaaggctgcatggaccttcacttacttgcactgcaggtcagcctaattgcatgagctctgtggaccacagagcagggttttccaaagttcaccaagacaaatattgtattatcttaacatatattcattttttaaaactgaaaatcagaagagcaactccacctagcagaagtcttttgcaaagggcgaggcgaggctaaaaagtatagaagagttcgtttccagtgcaattttataaacacagatggtccttaaattaagcaaatggtacctaaatgactgtgttgtggataatggtaacagagggagggactcgggggttttttaaaaagtactgattgtatgcagtgttttaaacagataactgtgatcttagtgtgatgaaagatgctgggagatttcaccagtggtatcttattatttttcggggattttgtaattcaacaaaattctgttgtatgccaagcataaccctaggtgtgagagcacaaggtgacttcagataccacctctatccttcaggggtttggggcccattattatgacttaatccattttgggcgtgagaagctgagggtcacagaaagaaccaattccctctttaaataatgccaccccaaccctcctcatctgccaggtctttcccttcttctatttgtatgaataatagtcactttctcttgtggagttcgctaaattctactttggcctatcaaatttctttcatatcacaactaaatttcttaaggacgggactatggttcatttgtcagacgaacaaatgggaatttgccaagagacacttgggttaatttacgtcttttccatccaagggcactatgttgaagtgaggctagtaggtcatgagtgtggttgaagttactttttcttactttcccgaccagcccccatccttactgcacttaaagttgattgtccattttattaaatgtccccaggaagccagaacacagggcagtaaagtgctgaatgcaaagggcaggagaaaaatggaaacaaccagaactgtaacaccaaggaatgagacctgcatgtcagatatcatgcccattgcactaagtgccattggggcacaattatcaaatggatgcattttccctagaaaaccatcttggagagcatgtggatgtacttctattttacatttccccctatttacaatcaatgagattgagattttgttgctgggactgctgatgatgggatgggaaaatataatcaaggtaatggacatgaggcaaaaatttaaggaaatgacaaaaacaagagtatttccattttcagttaagtgtatgtactgatgttctggaattcactataagaagttgcaaatggtgcatgaaatgaaaaattcctggtggtctccaggggacacagccggtgctgtgctccactctgggtaactgttttggattattttctctattccaactgaaataaaaaaaaattaattaaatgtggctaggttatcttgacagcagaatccattcccagttaattattattttaatacttgatggtgtctgtcaaattgtcgacatgtgacggtcctttcaaatttaaaggaatagctgatggtcactggccacccaagctgatactgattttatatgttgatgtttctcattttatttgctctttccttgaatatttattcaggacattctctaccagacatattgagtaagggcaacagaaacaatacataagtatcttataaatgtggaaaacaatgtatatgtgttttttatctctcaatgattggtgggtaccatatccccaaagtagaatgagcatttgagaaaacaggaaatatcctcttttaggcaccatctctgtcaaggctgatgctgggctttttatatattttctctaattcttgtggctgtcaaacaaggtgggcattatcattccctttataggggacacagctgtggctcagaggggtttattcactttcctgagggccacacacataatgagaggcagacacaggtgacgaagtgagttttccctgtcacgccatcttatctgtcacatacctctctgacatgctaaaattgcactaaacaaaagaattctcttatgcacatatcatgcaaaagatattctttaactggggatcatgtttctcattccatcaatagaatgactaacattttctgagggtgtctcacgtgaaagtaaatcgctcatgtttgttctttttaaaagatgcccttcgtattgtgtatcttgcagtcttgctttctcaaacttaagccaactatatcgtcatttttgcaaaatcactgcgtcagtttactattatttaatgtttattgctaccaattttaagaaatcctttataggactatttgtgaaattgattttgtgaggatgatgatataatttccattacattacagcatataaatataaatatatatatatatatatatatatatatatatatatatatatatatatatattttattatttttttttgagacggagtcttgctctgtcaccaggctggagtgcagtggtgcaatctcggctcactgtaacctccgccgcccgggttcaagcgattcccctgccttagcctcctgagtagctgggactacaggcatgtgctaccacacccagctaattttttgtattttagtagagatggtttcaccatgttggcgaggatggtctcagtctcctgacctcgtgatccgcctgccttggccttccaaagtgctgggatatacattttttttttttttttgagagatggagtgtcactctgttgccgaggctggagtgtagtggcgcartctcggctcactgcaacctcctcctccggggttcaagcgattctcctgcctcagcctccccagtagctgggattacagtcgtgtgccaccacgcctggttagtttttgtatttttagtagagatgggtttcactgtgttggctaaggtggtctcaaactcatgacctcaagtgatccgcccgcttcagcctcccaaagtgctgggattacaggcgtcagccactgtgcccggccggatagaaataatttttataaactccttggatgctacctaaaatcatcttgttttgctagtggcacatgctgcattttgggcagctgtggccttggtggattgctgaagtagatttgaccttacctggactgaggcagctgttgaagggaattgctgtgttcagtgtatactgccatccatgatttcatgaaaccagctctagctatttaagcaggggtcaaacttagaattctacattatttttttcccttttctgggaggaaagacagttgaacaccagcaaagactaagaagtttcttagaagactgtgggtccttgggccctttctattgaatttcagagtatttccaaatactatgaagtcttgcagcttagttgagaaatgccccagatggtgtgacattctgcttccaggagggattggaaagtatttccttttacataacattccactcagctcattcctttgctgtgtctgaaattgaatcccccaaagccacaattatcttaacattcagaagagtgtttatttaatctgcaaaatcttgcctcacttttggggagcatgttaacaatttcacttacaaatcttctgtgtaactcaaccccatggtggtgtctactgctgctcctagactctttaaagcacctttctcatctcaggtttgaaatgatatgtctcattcttgggttccttgagtcgtaatgggtttgtcttgtctccacagcataaatgactctttcttgatcaactagaaccacatcaacttcttccctccagcttcagtgatatattgtgaaacatggctattcaacgtcctgtagaccaaatgccataagaaaaatagcattgattcaaacgtatccatccagatacctaaaaaagttttacttcttaccacatcttgagtctgggcaaacacgcacttcctatggacattgattactgtctactgtagagataacatttgcacatacagattatggcacatggtagaaagtgttaagtaatgtaggaatggacatatcccaagcaaaattggaagccaagtcccctgtccctgctcaagttggtatgactggtgtatggtgccttaatgggtacttaaagtccaggtgagagtggcaggaggcagccaaatgcctaggtagataggagccggtccctgttgaaaccccacttccaagttgaagacagtttaaagactgaaagccaagctacaagttaaatcctcggaccagattgagaacttgtcttcttacttggtgcactcttctgattgatccccacctttcacctattttacatattcctgcccttccctaactggtttcctatgctgtcatgcccacctttgagtgttgccttcactttaaccttctgtgcatgctcacaaagtaattagcatgtaycctccattctgagttaatataaggccccagacccagccacatggggcaactttactgccttcaggtaggggaaccacccccaccacattccctctccactgagagttttccttttagttaataaattcggctccactcactctccattgtctgcatgcctaattcttcctggttgtgagacaagcagttggacctagctgagctaaggagcagaaagactgtatcacagggaacttgtgtaacagcttgatctcctgtcctacgtagctatctattggtaagaagttgaaggaacttgtgtcattccgttgtgcctgtcgtcttgaccttgtaaaaggtcttgggtaagcatgcaagaagttttgaagagggagatacagctaatttgcagatraaragcaagggaagaattcctggagaaaggaagagtttcctgagtcacctttgggaggtaggaagggtttgacatgtaggctgggcatctgggaacgagtgagggattctgtgagccccatctyagtggaccactcaaggaaggtgggtaagccctgggtataagtgtgtaagcagggaacagaaagtactgtgatttaaaatatgttaatttttctactgtacagatgagagccagcttggagatgggctgtagctcaagyatcttacctacctctgatttcttaatgccacgttataaggctgctgcttatagctcttgaagtcactccaaaaacagatgagtgagaccctgttgctaaagtcccactgggtgtagattattcacagatgtatacacagtggctcactccaggtaggatgtgatcagtgcttttagaaatacagaaagtcctattggtttaaaaaaaatttttttttgtaatgaattgagttttaaagctagcactgtacaataaaagggtgaatttcactatgaattatgacaaacacagtcatagagctgccatcatcactgtcaagatacagaacagtgccatcaccccccaaatgtcctctgtgccttactgtagtcatacctgctcctgacacctagcccctgggaaccattgatcttttttctgtccctagttgtttgtcttctctgcaatgttacataaacagaaatattctgggtgtcgcttttggagtttggattccttcccatagcataatgcatgcagtatttgtctgtttctgctaaattacccccaagacctagcgacttaaaacagcaaacatacactatctcactctgttagttttccattgctgttgtaataaattaccacaaacttatgtgcttaaaacccaaagctattatctgacagctctgtaggttaaagatttgtcatggttctcattgggctaaaattaaggtgtcggtatggctctgctgctttctagagactccagggagaatatttttccttgccttttccagcttctaaaggtcacccacaacatcttcaaaaccagcactgttgcatctctgaccttagccctgtagtcccatttccctctagccacaatcgggaaaggatctcaggactgttgtgatgacactgtgcttacctagattatctagcatgagctccctgtctcaaggtgatagagtttgcatgtttttctcctgcacatgccatgttgaaacataatccctagtgttggcggtgggtgtgctgggaggtatttggatcatgggggtggaaccctcatgcatgacttacggccatccctttggtgataagtgagttcacatgatatctggcaccttccttcctctgttgctcttgccctcaccatgttagctgcctactccccttttgccttccgccatgactgtaagcctcctgaggcctcaccggaagccaagcacatgcttcttgtagagtctgcagaatcggagccaattaaatctcttttcattataaattatccagcctcagttacttctttattgcagtgcaagaatagcttaacacacaaggtcttacccttgatcacggtctgcagcatgtcttttaccatgtaaggtaatatgttcagtggctgtgggggttaggatgtggacttctttgggggacttttatttttcccagttactatttttgtgactcaggaatttagggacagtttggctggttgtttctggctcagggtctttcttgggctgcaatcaagatgtcagctgggggctgggcatggtggctcactcctgttatcacagcactttgggaggtcgaggtgagtggaccatttgaggttaggagtttgagaccaacctggccaacatggtgaaacgccatactaaaagtacaaaaattagttgggcatggtggcacatgcatgtaatcccagttagttggggggctaaggctggagaacagcttcaaaacaggaggcggaggttgtggtcaactgagatcacaccactgcactccagcctgggtgaaagagcaaggccccacctcaaaaaaaaaaaaaaaaaaaaaaagttagctggggccaaggtcatctcaagtcttgactatgaaaggacctaacatcatgcatggctgttggcagaggtcacttcctcatgagcattaaactgaaagctataattcctgactattgaccagaggcgaacctcagttccctgccatgtgggcctcttcatggggcagttgataacacagcagttagcttccattggattgagtaagcaagagagcaagaacaggagtgatacagaagccagcatctttttgtaaaccaatctcagaagaattgtccatgattttttctatattctgttagttagaaacaaattcctaggtctcacccacccttgaggtgaggggattacacaaaagtatgaaaaccaggaagcagggagcattgggagtcatttggaccctgcctaggacagtgcgtttgagatccatgttattctatccattagtagtagtttgcttctttttaatgttgagtaatatgccattgtgtgtttatatattgctaatggattttaaagagggctaatcaacgtgttgattagagggaaattttcttcagtgaaataatatttgagcaaaaccttgaagaacaattaggaatttgacagagggaatggcacgaataaagacccagacttaatcaagtgaggggcgtactcatccatggggcagtggatgattcacctgcctggagcttaaggagaagggggtgtagttgtggctgttgctcagaaggacctgaatgtcaggatgcatttgtgtttaatttagcagacatttaggaaccattaaaagtttttgagaatgggtaggtaagattagaatagtattttaataagtttaactaggctttaaccagtattcataaaaagtcaagtgggagaatgtagaggtgacaagaccaggtgtgggctattgcagtgactacacctaaaaggaacagagctagaaacatggagtgacatgaagtcattgtcttaggttggtgatcctagcagctgagcctgggatggggattcttgttcctatgatcgattaggggactgttcccagaggagagcggagagggaagcaggctttggtttctactggaaatctgtttccgcccgattccatggggagctctggagaaggaattgtatcaccgagttggtcctccttgtcaacagagcatgtgtgtgggggtgatgacttcccagatgtgagggtgccctccagcaatggacagttatctggaggagttcatgctccagaggtagtgcctacctctgtggagaagtaggggatggcacggtattttaggggttcctaatgagcctagagatactgacattgaccagtcatggagactaaaggagaagatgggatagcacattgttttcctaagtatttgtaatcaggtgactggtttgcaaatatcagccattacagaaataaagggtatcaggacggggaggagatgtgaggagagaagatgaagagtttagatttaggcatgttgaccctgaatttgtgggaaggtatccaggaagataagactgacaggtgggaatgagattctggaacttggaaagaatatagtggctagagctaagggtttgaagtcttcatggcgattttgttcggagtcatggatttggaagaaactgctgcagggaagattttagagatggaatgaaaagagattggtgatggaacaatgggcaaaagaggaagggttggaggagacaaaaaatggagtggtagtggcattgggaggtccaagagtggatggtatcacagaagccaagacaggaaagtgagccacaagtgagggaggagcaggatcctctgcaacagggcagtctagtcttagcagagaggaggttgctgaatttattgattgagaagccactcctcgccaggcagttttgagaggttctggatggtgatagaatggaattcattcagctgatgatgagaagtagatttgggtcagggaaggagactgaatggagatgaatatttcaaaactatagaccataaatgggaagagagagacgagtgcaacctgcctaggtcaagtgaatgtccttttttctcttcccagcccttgtcttttttaccctctttgttttctgcatttctttccttctgttctgatttttccttacctgatggtcagaaagatctgattgagctgacgcgtagcaagaatgagccagtggagaggaaaatgtaaccacctaatgggttctcctttcctgctagctggacagagctgatttatcaagacgggggtactgcaaatagagaaagaatttaatccacacagagccagctgtatgggaaaccagagttgtactactcaaatcaatctccccgagaattcagggatcggagtctttaaggagaaatgtggtggatagggagccagtgagtgatctgggagtgctgattgtctcacgtgtccatgtgaagagaccaccaaacagggtttgtgtgaacaacaaggctgtttatttcacctgggtgcaggtgggctgagtctgaaaaaggagtcagcaaagggtgatgggattgtcattagttcttagaggttttggcataggcggtagagttaggagcaatgtttttggggcagcgggtggatctcacaaagtacattctcaagggtggggagaattacaaagaaccttcttaaaggtggtggagattacaaagtacgttgatcagttaggtagggacagaagcaaatcacaatgggggaatgtcatcagttaaggctattttcacttcttttgtggatcttcagttgcttcaggccatctggatgcatacgagcaggtcactggggatatgatggcttagcctgggctcagaggcctgacactgatttgttggcttgaagatgaaatcacagggaatcaaaggtgccctcctgtgctgactcagttcctgggtgggggccaaaggactggttggcaggtctgcatggggccaccgtgttgtcagaaatgcaaaaatctggctggtgcaatggcttacccctgtaatcccagtactttgggaggctgaggttgtcaggcctctgagcccaagctgagccgtcataacccctgtgacctgcacatatacatccagatggcctgaagcaactgaagaactacaaaagaagtgaaatagccagttcttgccttaactgatgacattccatcagtgtgatttgttcctgccccaccctaactgatcagttgaccttgtgacattcctcttcctgaggcagtgagtctcaggagctcccccaccgagcaccttgtgacccccgcccctgcctgcaagacaaaaccccctttaactgtaattttccactacccacccaaatcctgtaaaactgccctacacctatttccctttgctgacccctttttcaaactccgtctgcctgcactcaggtgattaaaaagctttattgctcacacaaagcctgtttggtggtctcttcacatggacacgtgtaacagaggtgggcagatcacttgaggtcaggagttcaagaccagcctggccaacgtggtgaaaccctgcatctactaaaaatacaaaaattagctgggcatggtgctgtgcacctgtaatcccagctactcaggaggttgaggcacgaggatcacttaaacccaggaggaggagattgcagtgagccaattgcgccactgcactccagcctgcaatgcagagtgaaactgtcttaaaacaaacaaacaaacaaaaagcaaaaatctgaaaagacatctcaaaagccaatcttaggttctacaacagtgatgttatctgcatgaataattgagaaagttgcaaatcttgtgacctgaggaataacggctggtaattatttaaaactcaagcccctctcatcctaacgtggtggcctttcattcattttacaggaacagtttagttttgggggaaagctgttatttaaactataaacgaaatttctcccaaagttagcttggcccatgcccaggaatgaccaaagacagctaaccagttaccggaaacgggtcccaatctagaccccaagagagagttgttggatcttgggcaagaaagaatttggggtgagtctataaaattaaagtaactttataaagaaagtaaaagaataaaagaatggctannnnnnnnnnnnnnnnnnnnnnnnnnnnnnnnnnnnnnnnnnnnnnnnnnnnnnnnnnnnnnnnnnnnnnnnnnnnnnnnnnnnnnnnnnnnnnnnnnnnnnnnnnnnnnnnnnnnnnnnnnnnnnnnnnnnnnnnnnnnnnnnnnnnnnnnnnnnnnnnnnnnnnnnnnnnnnnnnnnnnnnnnnnnnnnnnnnnnnnnnnnnnnnnnnnnnnnnnnnnnnnnnnnnnnnnnnnnnnnnnnnnnnnnnnnnnnnnnnnnnnnnnnnnnnnnnnnnnnnnnnnnnnnnnnnnnnnnnnnnnnnnnnnnnnnnnnnnnnnnnnnnnnnnnnnnnnnnnnnnnnnnnnnnnnnnnnnnnnnnnnnnnnnnnnnnnnnnnnnnnnnnnnnnnnnnnnnnnnnnnnnnnnnnnnnnnnnnnnnnnnnnnnnnnnnnnnnnnnnnnnnnnnnnnnnnnnnnnnnnnnnnnnnnnnnnnnnnnnnnnnnnnnnnnnnnnnnnnnnnnnnnnnnnnnnnnnnnnnnnnnnnnnnnnnnnnnnnnnnnnnnnnnnnnnnnnnnnnnnnnnnnnnnnnnnnnnnnnnnnnnnnnnnnnnnnnnnnnnnnnnnnnnnnnnnnnnnnnnnnnnnnnnnnnnnnnnnnnnnnnnnnnnnnnnnnnnnnnnnnnnnnnnnnnnnnnnnnnnnnnnnnnnnnnnnnnnnnnnnnnnnnnnnnnnnnnnnnnnnnnnnnnnnnnnnnnnnnnnnnnnnnnnnnnnnnnnnnnnnnnnnnnnnnnnnnnnnnnnnnnnnnnnnnnnnnnnnnnnnnnnnnnnnnnnnnnnnnnnnnnnnnnnnnnnnnnnnnnnnnnnnnnnnnnnnnnnnnnnnnnnnnnnnnnnnnnnnnnnnnnnnnnnnnnnnnnnnnnnnnnnnnnnnnnnnnnnnnnnnnnnnnnnnnnnnnnnnnnnnnnnnnnnnnnnnnnnnnnnnnnnnnnnnnnnnnnnnnnnnnnnnnnnnnnnnnnnnnnnnnnnnnnnnnnnnnnnnnnnnnnnnnnnnnnnnnnnnnnnnnnnnnnnnnnnnnnnnnnnnnnnnnnnnnnnnnnnnnnnnnnnnnnnnnnnnnnnnnnnnnnnnnnnnnnnnnnnnnnnnnnnnnnnnnnnnnnnnnnnnnnnnnnnnnnnnnnnnnnnnnnnnnnnnnnnnnnnnnnnnnnnnnnnnnnnnnnnnnnnnnnnnnnnnnnnnnnnnnnnnnnnnnnnnnnnnnnnnnnnnnnnnnnnnnnnnnnnnnnnnnnnnnnnnnnnnnnnnnnnnnnnnnnnnnnnnnnnnnnnnnnnnnnnnnnnnnnnnnnnnnnnnnnnnnnnnnnnnnnnnnnnnnnnnnnnnnnnnnnnnnnnnnnnnnnnnnnnnnnnnnnnnnnnnnnnnnnnnnnnnnnnnnnnnnnnnnnnnnnnnnnnnnnnnnnnnnnnnnnnnnnnnnnnnnnnnnnnnnnnnnnnnnnnnnnnnnnnnnnnnnnnnnnnnnnnnnnnnnnnnnnnnnnnnnnnnnnnnnnnnnnnnnnnnnnnnnnnnnnnnnnnnnnnnnnnnnnnnnnnnnnnnnnnnnnnnnnnnnnnnnnnnnnnnnnnnnnnnnnnnnnnnnnnnnnnnnnnnnnnnnnnnnnnnnnnnnnnnnnnnnnnnnnnnnnnnnnnnnnnnnnnnnnnnnnnnnnnnnnnnnnnnnnnnnnnnnnnnnnnnnnnnnnnnnnnnnnnnnnnnnnnnnnnnnnnnnnnnnnnnnnnnnnnnnnnnnnnnnnnnnnnnnnnnnnnnnnnnnnnnnnnnnnnnnnnnnnnnnnnnnnnnnnnnnnnnnnnnnnnnnnnnnnnnnnnnnnnnnnnnnnnnnnnnnnnnnnnnnnnnnnnnnnnnnnnnnnnnnnnnnnnnnnnnnnnnnnnnnnnnnnnnnnnnnnnnnnnnnnnnnnnnnnnnnnnnnnnnnnnnnnnnnnnnnnnnnnnnnnnnnnnnnnnnnnnnnnnnnnnnnnnnnnnnnnnnnnnnnnnnnnnnnnnnnnnnnnnnnnnnnnnnnnnnnnnnnnnnnnnnnnnnnnnnnnnnnnnnnnnnnnnnnnnnnnnnnnnnnnnnnnnnnnnnnnnnnnnnnnnnnnnnnnnnnnnnnnnnnnnnnnnnnnnnnnnnnnnnnnnnnnnnnnnnnnnnnnnnnnnnnnnnnnnnnnnnnnnnnnnnnnnnnnnnnnnnnnnnnnnnnnnnnnnnnnnnnnnnnnnnnnnnnnnnnnnnnnnnnnnnnnnnnnnnnnnnnnnnnnnnnnnnnnnnnnnnnnnnnnnnnnnnnnnnnnnnnnnnnnnnnnnnnnnnnnnnnnnnnnnnnnnnnnnnnnnnnnnnnnnnnnnnnnnnnnnnnnnnnnnnnnnnnnnnnnnnnnnnnnnnnnnnnnnnnnnnnnnnnnnnnnnnnnnnnnnnnnnnnnnnnnnnnnnnnnnnnnnnnnnnnnnnnnnnnnnnnnnnnnnnnnnnnnnnnnnnnnnnnnnnnnnnnnnnnnnnnnnnnnnnnnnnnnnnnnnnnnnnnnnnnnnnnnnnnnnnnnnnnnnnnnnnnnnnnnnnnnnnnnnnnnnnnnnnnnnnnnnnnnnnnnnnnnnnnnnnnnnnnnnnnnnnnnnnnnnnnnnnnnnnnnnnnnnnnnnnnnnnnnnnnnnnnnnnnnnnnnnnnnnnnnnnnnnnnnnnnnnnnnnnnnnnnnnnnnnnnnnnnnnnnnnnnnnnnnnnnnnnnnnnnnnnnnnnnnnnnnnnnnnnnnnnnnnnnnnnnnnnnnnnnnnnnnnnnnnnnnnnnnnnnnnnnnnnnnnnnnnnnnnnnnnnnnnnnnnnnnnnnnnnnnnnnnnnnnnnnnnnnnnnnnnnnnnnnnnnnnnnnnnnnnnnnnnnnnnnnnnnnnnnnnnnnnnnnnnnnnnnnnnnnnnnnnnnnnnnnnnnnnnnnnnnnnnnnnnnnnnnnnnnnnnnnnnnnnnnnnnnnnnnnnnnnnnnnnnnnnnnnnnnnnnnnnnnnnnnnnnnnnnnnnnnnnnnnnnnnnnnnnnnnnnnnnnnnnnnnnnnnnnnnnnnnnnnnnnnnnnnnnnnnnnnnnnnnnnnnnnnnnnnnnnnnnnnnnnnnnnnnnnnnnnnnnnnnnnnnnnnnnnnnnnnnnnnnnnnnnnnnnnnnnnnnnnnnnnnnnnnnnnnnnnnnnnnnnnnnnnnnnnnnnnnnnnnnnnnnnnnnnnnnnnnnnnnnnnnnnnnnnnnnnnnnnnnnnnnnnnnnnnnnnnnnnnnnnnnnnnnnnnnnnnnnnnnnnnnnnnnnnnnnnnnnnnnnnnnnnnnnnnnnnnnnnnnnnnnnnnnnnnnnnnnnnnnnnnnnnnnnnnnnnnnnnnnnnnnnnnnnnnnnnnnnnnnnnnnnnnnnnnnnnnnnnnnnnnnnnnnnnnnnnnnnnnnnnnnnnnnnnnnnnnnnnnnnnnnnnnnnnnnnnnnnnnnnnnnnnnnnnnnnnnnnnnnnnnnnnnnnnnnnnnnnnnnnnnnnnnnnnnnnnnnnnnnnnnnnnnnnnnnnnnnnnnnnnnnnnnnnnnnnnnnnnnnnnnnnnnnnnnnnnnnnnnnnnnnnnnnnnnnnnnnnnnnnnnnnnnnnnnnnnnnnnnnnnnnnnnnnnnnnnnnnnnnnnnnnnnnnnnnnnnnnnnnnnnnnnnnnnnnnnnnnnnnnnnnnnnnnnnnnnnnnnnnnnnnnnnnnnnnnnnnnnnnnnnnnnnnnnnnnnnnnnnnnnnnnnnnnnnnnnnnnnnnnnnnnnnnnnnnnnnnnnnnnnnnnnnnnnnnnnnnnnnnnnnnnnnnnnnnnnnnnnnnnnnnnnnnnnnnnnnnnnnnnnnnnnnnnnnnnnnnnnnnnnnnnnnnnnnnnnnnnnnnnnnnnnnnnnnnnnnnnnnnnnnnnnnnnnnnnnnnnnnnnnnnnnnnnnnnnnnnnnnnnnnnnnnnnnnnnnnnnnnnnnnnnnnnnnnnnnnnnnnnnnnnnnnnnnnnnnnnnnnnnnnnnnnnnnnnnnnnnnnnnnnnnnnnnnnnnnnnnnnnnnnnnnnnnnnnnnnnnnnnnnnnnnnnnnnnnnnnnnnnnnnnnnnnnnnnnnnnnnnnnnnnnnnnnnnnnnnnnnnnnnnnnnnnnnnnnnnnnnnnnnnnnnnnnnnnnnnnnnnnnnnnnnnnnnnnnnnnnnnnnnnnnnnnnnnnnnnnnnntatagataataaaatagacttgagagtccagaaatgaatccatgcatattgtgaattgattttcagcaaggatgccaagacaattcaaaatagtcttttcaacagtgatgctagaaccactggatagccccatgcaaaagaatgagattagatcacacttgcataaactacacagcaaaaaatagcaaaaaaaaaaaaaaaaaaaaaaaaggggtcagagacttaaatgtaagagctaaaactatacaactcttagaagcaaacataggggtatatttttctgattttggcttagacaatgatttcttggatacaaccctgacagcacaagtgacaaaagaaaaaaagatatccagaatgatccagaatgaaaagtgtttgtgctgcaaatgataccatcacgaaagtgtacagatgacctacagaatgggggaaatacttacaaattaaatattaaataagggatttgtatctagaataaagamcttttacaattcaataatgaaaactcatttaaaaaatgagcataaratctaaatagatattcctccaaatatgatacacaaattgccaatgaatacataaaagatgttcaatctcattagggaaatgcaaatgaaagccacaatgagattccacttattgctaggatggctaaaataaaaaagtcagataacaaatacttacaaacacatggagagatgaaagttcaaatacagtcctggcggaaatgtaaaattgtatggccaaactggaaaacagtttggccattattcaaaaagttaaacattgaattaccatatgacccaataatcccactcctagatgtatcttgaagagaaatgaaaacatgcrtttccatagcatcttacaaatgaatgtacatagtagtgatattcctaatagccaataaatggaaacaatccaaatatccatcattggtgaatggataaacaaagcgtggtatattcatataatggaatattatttgcccattaaaaagaaatggattactgatatatgctacaacatggatgaaccctgcaaacatcatgccaagggacagaagccagtcacaaaagactacgtattgtatggttccatttagtatataaaatgtccggaataggcgaatctataggacagaaagtacactgatggtgttttgggaataagagtgtaggtrgatagagggtggctagtgattgctaagttttttttttttttttgagttaaaaaagtgctataawattagaatgtagttatggttgtacaattatttgagtatactaaaacagctgtacagtatacataggtagattttatggtatgtgcattatatttcagtaaagttctttaataaattagytaatgcttattgtagaaaagttggaaaataccaaaaaccataaacaggaaataggaaaaaaagtaatcctgactgtatatctggaaatcttttcgtggggtatggggtatgaatcacacatattaattttaatttcctgctttttcaattaaattgagaaagtttgggaacctctggcttaatcattatttatccacttctctgttgttggatgttagattgcttctagttcatatgtaattttataattttagttgacatgtcattatggattcttgggcataaacgtttatatgaattttgaatattaggaaataatcttggaagctatattagttttctaaagctattataacaaattaccacagatggagtgcctcaaaacaacagaattttactctcttacagtttcagagaccaaacatctgaaatcaagtggtttgcagcgttggctccttctggaggctggaaggagcatctgttccatgcctttctcctagcttcccatgactgccagccacccttggaatttcttggcttttatcttagtcagtctaatctctgcctctgtctttccatctccttctctgtgggtgttccttctccccttctgttttgtaaggataggcctgtcattggatttaaggcccaccttaatccaagatgatctcattttaagatgtgggacttaatcacatttgcgaagaccctttttccaaataaggtcgcattcacagatccctaccattcaactcactatggaagcaatgggatgggaggtaccattcaactcacagattcctaccattcaacccactataaagcagtggcatatgaaaaggatgggaggttgctatgggaatggtctgccccagatgcaggtaaaatggggaagcattttatatagaatggaaaaacaacagtaaagctggctaaaacttgatctgctttttacagtcatgtgctgacaattctaaacattatcaatgataaaatacttctccctcatgatattaactgtgcaatttttgctgcccctgctacatacatgctttattgcttggaaacaggattacttggtgaaataatgtgaatctttcaattctcatgatacatgttttcaacttaatatccagggtgcaggaatatatattcccaccaactttatacaagataatacaaatataatagtatgaataaatatgctaatttgatagaaaatattttaatatttactactagtgtagttggacgtgttaaatattgcaatggttatttgtaatctacctttataaaatttctaatgtctgccactgtttctgttagactcttaagaagatacgtgtttgtctcatagatttgtaagaactctttatatactaaaaatatggggcttctatatgattgcatatattcgtcacttttgttccactgttttagagagcagaagattttaatttctataaagatttttatgtttccctttattgcatgccaatgtttgttttttaaaaacttgtacgtcttaggctgcgatgtgaaaagtgtcttttttttgatttggaaacagagtcttgctctgatgcctgtagtggtatgatcatagctcattgcagcccttggaactcctgggctcaagtaatcnnnnnnnnnnnnnnnnnnnnnnnnnnnnnnnnnnnnnnnnnnnnnnnnnnnnnnnnnnnnnnnnnnnnnnnnnnnnnnnnnnnnnnnnnnnnnnnnnnnnnnnnnnnnnnnnnnnnnnnnnnnnnnnnnnnnnnnnnnnnnnnnnnnnnnnnnnnnnnnnnnnnnnnnnnnnnnnnnnnnnnnnnnnnnnnnnnnnnnnnnnnnnnnnnnnnnnnnnnnnnnnnnnnnnnnnnnnnnnnnnnnnnnnnnnnnnnnnnnnnnnnnnnnnnnnnnnnnnnnnnnnnnnnnnnnnnnnnnnnnnnnnnnnnnnnnnnnnnnnnnnnnnnnnnnnnnnnnnnnnnnnnnnnnnnnnnnnnnnnnnnnnnnnnnnnnnnnnnnnnnnnnnnnnnnnnnnnnnnnnnnnnnnnnnnnnnnnnnnnnnnnnnnnnnnnnnnnnnnnnnnnnnnnnnnnnnnnnnnnnnnnnnnnnnnnnnnnnnnnnnnnnnnnnnnnnnnnnnnnnnnnnnnnnnnnnnnnnnnnnnnnnnnnnnnnnnnnnnnnnnnnnnnnnnnnnnnnnnnnnnnnnnnnnnnnnnnnnnnnnnnnnnnnnnnnnnnnnnnnnnnnnnnnnnnnnnnnnnnnnnnnnnnnnnnnnnnnnnnnnnnnnnnnnnnnnnnnnnnnnnnnnnnnnnnnnnnnnnnnnnnnnnnnnnnnnnnnnnnnnnnnnnnnnnnnnnnnnnnnnnnnnnnnnnnnnnnnnnnnnnnnnnnnnnnnnnnnnnnnnnnnnnnnnnnnnnnnnnnnnnnnnnnnnnnnnnnnnnnnnnnnnnnnnnnnnnnnnnnnnnnnnnnnnnnnnnnnnnnnnnnnnnnnnnnnnnnnnnnnnnnnnnnnnnnnnnnnnnnnnnnnnnnnnnnnnnnnnnnnnnnnnnnnnnnnnnnnnnnnnnnnnnnnnnnnnnnnnnnnnnnnnnnnnnnnnnnnnnnnnnnnnnnnnnnnnnnnnnnnnnnnnnnnnnnnnnnnnnnnnnnnnnnnnnnnnnnnnnnnnnnnnnnnnnnnnnnnnnnnnnnnnnnnnnnnnnnnnnnnnnnnnnnnnnnnnnnnnnnnnnnnnnnnnnnnnnnnnnnnnnnnnnnnnnnnnnnnnnnnnnnnnnnnnnnnnnnnnnnnnnnnnnnnnnnnnnnnnnnnnnnnnnnnnnnnnnnnnnnnnnnnnnnnnnnnnnnnnnnnnnnnnnnnnnnnnnnnnnnnnnnnnnnnnnnnnnnnnnnnnnnnnnnnnnnnnnnnnnnnnnnnnnnnnnnnnnnnnnnnnnnnnnnnnnnnnnnnnnnnnnnnnnnnnnnnnnnnnnnnnnnnnnnnnnnnnnnnnnnnnnnnnnnnnnnnnnnnnnnnnnnnnnnnnnnnnnnnnnnnnnnnnnnnnnnnnnnnnnnnnnnnnnnnnnnnnnnnnnnnnnnnnnnnnnnnnnnnnnnnnnnnnnnnnnnnnnnnnnnnnnnnnnnnnnnnnnnnnnnnnnnnnnnnnnnnnnnnnnnnnnnnnnnnnnnnnnnnnnnnnnnnnnnnnnnnnnnnnnnnnnnnnnnnnnnnnnnnnnnnnnnnnnnnnnnnnnnnnnnnnnnnnnnnnnnnnnnnnnnnnnnnnnnnnnnnnnnnnnnnnnnnnnnnnnnnnnnnnnnnnnnnnnnnnnnnnnnnnnnnnnnnnnnnnnnnnnnnnnnnnnnnnnnnnnnnnnnnnnnnnnnnnnnnnnnnnnnnnnnnnnnnnnnnnnnnnnnnnnnnnnnnnnnnnnnnnnnnnnnnnnnnnnnnnnnnnnnnnnnnnnnnnnnnnnnnnnnnnnnnnnnnnnnnnnnnnnnnnnnnnnnnnnnnnnnnnnnnnnnnnnnnnnnnnnnnnnnnnnnnnnnnnnnnnnnnnnnnnnnnnnnnnnnnnnnnnnnnnnnnnnnnnnnnnnnnnnnnnnnnnnnnnnnnnnnnnnnnnnnnnnnnnnnnnnnnnnnnnnnnnnnnnnnnnnnnnnnnnnnnnnnnnnnnnnnnnnnnnnnnnnnnnnnnnnnnnnnnnnnnnnnnnnnnnnnnnnnnnnnnnnnnnnnnnnnnnnnnnnnnnnnnnnnnnnnnnnnnnnnnnnnnnnnnnnnnnnnnnnnnnnnnnnnnnnnnnnnnnnnnnnnnnnnnnnnnnnnnnnnnnnnnnnnnnnnnnnnnnnnnnnnnnnnnnnnnnnnnnnnnnnnnnnnnnnnnnnnnnnnnnnnnnnnnnnnnnnnnnnnnnnnnnnnnnnnnnnnnnnnnnnnnnnnnnnnnnnnnnnnnnnnnnnnnnnnnnnnnnnnnnnnnnnnnnnnnnnnnnnnnnnnnnnnnnnnnnnnnnnnnnnnnnnnnnnnnnnnnnnnnnnnnnnnnnnnnnnnnnnnnnnnnnnnnnnnnnnnnnnnnnnnnnnnnnnnnnnnnnnnnnnnnnnnnnnnnnnnnnnnnnnnnnnnnnnnnnnnnnnnnnnnnnnnnnnnnnnnnnnnnnnnnnnnnnnnnnnnnnnnnnnnnnnnnnnnnnnnnnnnnnnnnnnnnnnnnnnnnnnnnnnnnnnnnnnnnnnnnnnnnnnnnnnnnnnnnnnnnnnnnnnnnnnnnnnnnnnnnnnnnnnataccaccacacctggctaattttttttgtgttttgacagagatggggtttcaccatgttggtcaggctggtctcaaactcctgacctaaaatggtccacctgccttggcctcccaaagtgctgggattacaggcgtgagcccccgcgcctggccctgtgtcagcctttttaacagcataatttttcctttattagtcataactactttaagggctattttgatttacagacaaagtgagacttggatgaattaagaaagaattaatcaggtggttgaacctgagttccaactagggtgacaactcttcgcagattgcctgctgctgtcctggttttcacactgaaagttccgtatcctaataagcctctcatcctcagcaacggaggacagttgcccactcaaagccttgtgacattctagrgtatcctatttctacatggtgggaatctagaaracggagaaagaatttctcattcccgaaggagcatggattatccttggttgtagtgtttatgtccacatcacgtggattcccraaggagcatggattatccttggttgtagtgtttatgtccacatcacatggratattttatttttcaggcctcttcatgtgcttgtgtgcaacgcagcaacttttgctstaccctggagtctcaccaaagatggcctggagaccacctttcaagtgaatcatctggggcacttctaccttgtccagctcctccaggatgttttgtgccgctcagctcctgcccgtgtcattgtggtctcctcagagtcccatcggtgggtttgaattgcatatttgttcacttatcccctttctcataccagctaatattcccccaaggctstcattctgaaaataattttcattagtcctgcttgagacatgtgggtggactcagcttggctcacttaatttttccaggtcttttttgttcgcctgtgattgtgggggactgtttagaaggactttctagagcaaggaagattgtttttacgactatacttcaagctcctcattgattttgcttagagatggaataataattgatgaaatctgaatggcatgacctttattgatttgtaattcaacaacttcaacatcttaccaagaagaatgtgcagttattctagcaggagaaacaatgcaattagagcctgcgagatgaaatcaaattgttttataatgagaaattagggaattcgaggcagacattagctgtgtaattgtggaaagggaagaactgtagttagagcatattagaaatctggccgtgcctcttttggttaaaatttcaattaaaacatcagatggcacttttttcctattgccattaggagaatattcaattgactgaaaaggacatttgaaaatttcctcgtattttcagcatatttgtttctagagttggagaaacaactatttgtctagagagaagtactctgaaaagacaaaggccttgctgggtgaggctggatttaatacatgttagggagatttctctttcacgtttgcttggtgtgtgtttggcggggggaacttacactcttagcaaagtagctagaaaaaaaaataacgtgcaaggggcctattttttcctccttcttctccgtcttaagtcctgaaatgttttagtgacccagaatgaagcttatttttttaatcatacttccataaaatgtaacccctgggacttggaagagagagaccagccaagggttagcttgaaccctttatcactcccaaacacaggggcttatggtataagtgacacactgcagatagatttacttttgccattttaaatttatgatggctgaaatgaaaggtaaatgccagtaataatcctcccccgtgttaaaagacatgaaacatctagtaattaggtggtaacaaaatctggacagccttatctttgcaaatcacaccaggtttgtgaaggaaagtggagtggccctgttaaggggcgagggaggctactgtgggggcaggcagcagagagagctccagaaataaatctgccagccccagtcatccaccagatgtggagggcaccacgggatatgtttaaatgagctggtatttaatgggagattatgtcgaattgtcagctgctcactctccttgtaaatctgtatctcaaatggtatttcgtgtgacgtctttgttctttgcttaactacggtgtaattcatgcctacttcagagatccaaatctcagcatcatttaaaagattagtttgaaaggaagggacttgggctcttgaattagacctatgttagtttatagggaggccttcctgaaatgtgttgtcaggcttgctcctgtgtgatggctggcactggttttatgctttccaattattctttgcacatcgttatttattattactgttattattatttgacatggagtcttgatctgttaccaggctgcagtgcagtggcatgatctcggctcaccacaacttcagactcccagggttaagcgattctcctgcctcagccttccaagtagctgggaccacaggcgcttgccaccacacctggctaatttttgtatttttagtagagacggggtttcaccatgttggccaggatggtctcgatctcttgaccttgtgatccgcctgccttggcttctcacagtgctgtgattacaggcgtgagccaccacgcccggcctctttgcacattatttaagggtgttttaacaaaatggcaatttccccaggctggcttgtgtattaccttcgcattgcatcccttggctcccatgagtgagcgtggtgacttggtgcgtaggtggtacgtgaagacagttgctcactacccaagaactcagggccctaaaccatgctgtaaaatgcaagtgctgatatctaattacctccatcaaccttggcagaatctcttcgttggagttaagaccccctgttaggggaaaaaagaaagtcctatgtttgcagaaaatattatactagactgctccaaggcaaaatatttattagccttcctgtgtcttcactgtgttttagttacttatctggaatctgagcaactgaattgagtttctgcatacctaaaatacatcatagtgaaatgagaagttgacttctttgctgtgaaaaaatttcagataacaattaaagtagaatgaaaagagcagagtgctggttgaacaaccctcaatggctgcagctgcatggagtgccaaattgccctcccccaccccacacacaaaatcacacatacacgcacgcacgcacacacacacacacggagtttctcagcttctgtgtagacagaatccagcctaattattttaggcgggaattttaaaaatcctcaataaaattgggcttggtagcacatgcctgtaatcctatctagtaagaggctgaggtgggaggatggcttgagcccaggagtttgaggttgcggtaagcgttgatcatgccactgcattccagcctgggtgacagagtgagaccccatctctaaaataaaaattaaaaattgtttaaaaaaaatgcagtataggccaggcacagtgtctcacgcctgtaatcccagcactcaagagttcgagatcagcctagccagcatggcgaaaccccatctctactaaaaatacaaaaattagccaggtgtggtggtgcacgcctgtaatcccagctatttgggaggctgaggcaggagaattgcttgaacttgggaggtggagattgcagtgagtggagattgcaccagtgcactccagcctgggtgacagagcaagaccctgtttcagaaaacaaaaacccaaaaagcaaaacccccacagtatatatagaaatacaagatttgtgrggggcgggggtccccctacaaagcaagtgttactgtccacagagcaaatgtcaatattttaatgtactagtaagggaaaattctattaagacataattgtttggctttgtcagtttgtcaacttgaaaatagagtcagcagcatctraagagttgttttactacctctggagctgagaggtgaacatagtcgtttttcaggaagccgtttctggctcagacagatmagaagctggcccacccttgccacttcctggaggactgtcagtgctagctaatgagactgtaaaagtggactatctgcccaggagacagygaggaaggaaatcaggggtcacccttayagsgaagggctctttgcagagagagtgcctgatacgtagcagctggtacttctccatcttgaaactgtccttcctggttttgtctaatttgtcatcatgggattcttttgacttgtttctagattagggatcaagaagaaatgactttctcctcttagacatttaattcacttagtgttccctagtcatgacatacttctgtgttatccttaaatactgaaacagggaccttattcttaacagtagaaaatcactgtgtatgatgatagtgtatacctgtaataccagctactcaggaagctgaggcaggaggatcccttgagctcaggagttgagattagcatgggcaacaaagcaagaccttgtctctaaaagaataagcagaaaccaaaagccctaaacatgaggaaattccacatgtaaacattaatggaaaacatagaagagttgaacctagtggtaaattttacctttagagcaatgcttgaaacaagggaaactgtcaaattctcatcatgggatttgtgttcctttgttttttttattaaggacttggtccttggattggaattccaaacccatgaccaaactgtaatcatctaattctgtattgagtccttactatgtgtcaggcactgtagtaagcaacactcaagaatcttacagtctactttccaagaattcacagtctagttttggaatcaggtgatcaattgacttacagtctggtatggtgatgacagaggagcaatgtacagatagaacagaaggatggcacagtgagccttttcaccaatcttggaaggccagtaatgtcagtgaacactaggaatggtgtcatggcctgggtcctgaagagtggatacttaatgtccatggaggcatgcatttttatctgccttgcatggcttctttcattctctccctgacttccacccaaaaaatcaccatgatatccagctgtggaagagttcattatggagagcttcctggaagaagtagtccctgaactgggttgggctaaacaaatatgccaagaagggtttctggaagcagttgacaaaagatgagtagagagagggagggggtggtgctatatttattccatacctttcagatactctctaaatccttgtccctgttgtctatgccatgtaggtagagttttcaagtcatgtcccataccttggatcattggattctcaactcagtagcacctttgtgtgacacctcttctgtaataccttattatgttgaaataaagttagcaaataacataacttacatgcacaaatatattttcaattcgatatgatagctttactgtaatgaaagaaaaaataactgaaacaaaatggcgtgtgtttcaacatgtaaatgcttgggccaggctacaggaaagatggggatgtatgtatccgtggatgaatcaccttgaatggactctcataaaaaagcccaccattaccaggtgtgtggtattgcagactccagcaccaccaaccttgagtgaagcctgactatattagtctgttctcatgctgctaagaaagacatacccgagaccgggtaatttataaaggaaacaggtttaatgggctcacagttacacatggctggggaggcctcacaatcatggcggaagatgaaggaagggcaaagggatgtcttacatgacatcaggcaacagagtatgtgcaggggaattctcatttataaaaccatcagatttcgtgagacttattcactaccatgagaacagtatgggagaaagcacccccatgattcacttatctccacctggctctgcccttgacacatgggggttattacaattcagtgtgagatttgggtggggacacagccgaaccgtatcagtcaccctccaaaaatcacacaaaatctgaaagtgcttttattcattctacatgtaaatagttgttgcactacccacctggaaattcagtggatgtttctaggctcagataattatccacaggcttttcatctccatgagtgtccactggggcattcttcattgagcaatacatcatgtgcattgcaagacatctgccatccctgctaccatcaccagcagtcatcacgacaaccagaagaaggccgtcatatattttcaaattgcctgctgagttccattgccttagacaattaagcttggaagtcagactcttcctgtggtttgggtactagaaaaaaggcagccaacaattcgtttcaaggtctcatttctgtatccttgatgacgtttctggccatcagctttgttgatgactttagagcagctatgtcatttaacactagaaattggatgtcaccgagtcctgtggaagggatatttaatttccattaaaacatgaatttcattctgcccttgccatgcttttcttggtcttagcccaacctgagctgctgatattaaggaatrataggataattccataattttcattttaccttttgctttttgttttccatagcagttatctagaggattcccattatgcttcttcattacccggtgcccagaatgaacttatagaagcagaatatgaggggtcctttgacaaacatgagactgtttagaaaattgcttttgtttgctgtgatccattttgtaagggaagtcactataatgttgttatttaagagaaagagacaaacggaaagaaacaaacagctggtgtttaacgactccgtcagacccaattataaagcatcaactagttacgttgatttgtgtacatccatgccatgggtatacttaaaaacattagattttgccagaactcatcttggctttgtttacatttttcttttaaacgtataagactattgatggtacctcaccaaggttataacccctttataatcattaatttttaatctagaaaagagtcttggagacaacaagactcatctataatttcttggatgctcaaatgaaaatatacaggactcaagcattagctaaaataatccaggaaagccctgtcaaaggttaggaatgtgatatctttctgtttccaaaagcagcagccctttattcaagacacttttctgtttaatttaattatctttgaacttcctgttgaaggttttgaaaaatatatgttagagggtggggagagagttcagtatgtcaggactgctacatttatgagtgtgggtctttattgaagtctctctttgtagccaatccttttttttttttttaatttttaaattttaaattcttacttttagatatgggggtctcactctgttgcccaggctagagttcagtggcacaatcatagctcactgcaacgttgacctcccaggctgaagcgatcctcctgcctcagccccccaagtagctgggaccacaggcatgtgccaaaatactcaactaattgtttattttttgtagacatggtgtctccctatgttgcctaagctggtcttgaactcctacactcaagcaatcctcccgcctcagcttcctaaagtgctgggattagaggcatgagccaccagacatgacctgtgtttatattgttaaatcaccattgtcaatcttgaaaggagactttgttttgatgtatgtaagattgagtttttactcatctctacatagtttcctcagattgcttttttttttttttgagaccgagtctagctctgtcacccaggctggagtgcagtggcacaatctttgctcactgcaacctctgcctcccatgtttcagtgattctcttgcttcagattcccgtgtacaggcatgccaccacacctggctaatttttgtatttttagtagagatggcattttgccatgttggccaggctggtcttgaactcccgacctcaggtgatccactcgtctaagactcccaaagtgctcggattacagatgtgagccactgcacccagcattccttagatttccaataaaaataaaaagctgtgtgggaagtcagaacttggttgcttcatgtcatatttcctatttttaagatttacagatattaacgactccttgggaaaastggacttcagtygcctctctscaacaaaaaacgactattgggcgatgctggcttataacaggtccaagctctgcaacatcctcttctccaacgagctgcaccgtcgcctctccccacrcggggtcacgtcgaacgcagtgcatcctggaaatatgatgtactccaacattcatcgcagctggtgggtgtacacactgctgtttaccttggcgaggcctttcaccaagtccatggtaagagaacagcttctggcgccgcaaacaccttgggtcytagagaaacctgcacacttgtgtstccacctttttacctcttgcgggcatgagtctggtctcagtaatmacattgtccagcccatcataaagggctcttgaacacattttcatcaactttaggttaagtctgtttgggtaaatgcgtcttggagggctgggtagaagatgtgggtttcagtatcatgttaagtatggctgaaagtccttatggaaatggtgatttttttgtttgtttggttttgttttttttggggttttttattcagaaactttgaaaatctattttgttgaatggagcacttgaaaactgctgttttgtgtcagtaggtaaacaacaaacattggtgactactgaattttcagcagatgtgattcctttgtttcacagaaaawctgtatctkwtgttctaaatttttttcttctaatgggtataatcctctgttggagagtcctttgatagctaggagtgtgttttcttctttactttcccaaagacaattttggatgaatcatggtactgtggttacatttggaagtgtttacaaaggtgataagatgtttttatagtttggtgttcatttatcgaccatattaagaaccttcttctatgaaatgsttttagtaggaagtaytttgaatgaagaaagcgtattttccacaatatatttggtagattatttttcaaaaccaaaggacttcaaaaatgtcttcctattagtggacaccagtattccagttacccaaacttaaaatctacttgacagaaatcacccttttcccaaacacatttgccttttagcgatatcacaggccttcacagttggacctaggatattaataaaacaaagcaaaacaacaacaaaagaagaactattgcaggcctattatcctccagctgatctcacgaccttggaaactgtctgctgccttctcttacactcattcccacctgccacccttaaccttcgtatttggggatgacttttttttttttttttttttttttttttttgagacggagtctcgctctgtcgcccaggctggagtgcagtggcgggatctcggctcactgcaagctccgcctcccgggttcacgccattctcctgcctcagcctcccaagtagctgggactacaggcgcccaccactatgcccggctaattttttgtatttttagtagagacggggtttcaccgttttagccgggatggtctcaatctcctgacctcgtgatccgcccgcctcggcctcccaaagtgctgggattacaggcgtgagccaccgcgcccggcctggggatgacttttaaaaccacatcaaaagtcttttgaagtgcttaggaggaggtaagtaagtatatcttttattctaatcacccaagtggtttttaggcagagtaaacagacatattccaagagtcgaatacttaggatcagtggcagtgaagtgaaaggacctacggagaatggtgttccatgccgcagggtgggattgatctctaggaagtaaatgaatgaaacttacctgtaggtggatcacagggttttgaaatctccccatcactttgctcccgatgactgcataagcgcagcctcttcatgaaagtttctttgaccatggttatgcctcatactttgttgtgtccttcagtttacatgaaaagaaggaatatggatctgaactgggtgccagtgccatttaaatgaggcatttaggaatggggagaggagagaggtggattcttccttattttctgctggcccagtgccttccgctttaacaagcccagtcaaccatcatttgtaatctttgggtcttgagtcatctcacttgtatttgatcattgatgtgttttaaggagctcggttcagtggcatcagagagttcgttttctccttcttccataaggtccctaatcagaggaacgggatgggaaagctttagagatgagtctgtgactatggaatttggtgaggggtgatataaccatcctgccatttgttgtagactcgaatggatgaggagtcattgatagaaaatagtggaaactgttattctgtggcctgatcccattgcttagggactctgtgccagggcatgtgggaaaagaaggaaggcaagttctgctaaaatataaagtcagggtaaacatttttatttattggagaagagttgattattatctaatatttaatataatatgcttaataaagtcagacttgaaagttggctggttggacctaacgggagtatctctaaaaaataccagcaaattaagttggatcggtgactgtatcatgatatcggagtgttagctgttttgggagtacgtgtgctcaggacttgggctgagtggaaaaccagagtatggggttagaaatggaggcagarggactaccatgtcggggaggatgcacaatgaattggacgaaggttgcaactcagtgagcaccgtacctgtagtgtgtcttagtaatagcagatgcccaacctccatgcctaactcctttgcctaccccaccagtgtgcagcagcctctgccgcaccctactgcagtctctcctatttccctggcaggagagctcagagactacttgtgaacaggcctcaatgcctatagcaaggcaaggcttgggagaaacaaatgtcctctgggagcagccttgggtaaaagattaactgcgcactgagctttagatccctgagtgagaaagctgtgggaaaatgagtgtgtagctcatgagagggtttggagaaaagtggtgacatcgcaaaaatcccaggttttgttgaagttgtctgtggaggggcactcatagaaagggcactggacgtgagcatttcccttgtagttgagatgggatttgacatgacttcctggtggtggcaagacaagaaagtggcaacctgggacagtggacctcacagctctcctgctaatggtgctgatggctaagctcagctcttacccttgaccactggaacaacttagacatgtcaccagctttctgascctgtctcattacgatgaaaattgtgatacaggttagtgtaaggaccgacaataatgcatataacatcaataatgatggatatagaatttctgcagttattataatctggctctccagtatggtagtcgtgggccacatgtggctattgagttctaaaaatgtggctaatagaactgaggaagtgaattttcaatttgattccatgtttgttaattcgaactgaaaaacaccacgtgtgccaagtggctgccatactggagagcgtggtcaaatgacatgcctagctcagtgcctttcgcatgggaggtatgcagtacttcctgccacgatggctgttactcttgtcgttgtgagcagtgccttggtcccgatgatgattctccaaaatgtaatctctgctgacagaacaagagtctgcaaattgggagtctggaaagggaagakaagggctttgtccctggccccaaagactcagggagaggtttactggccaggtagaaagggcgtccaggtgaagggaccctggttcagtgatctccaacctgcacgtctcatttgtgaggaagccgtagggtgtggactttycttgtttctgaccttgagtgattagaaaatagcagcttttatatgtcacaaatggactttagataagcatgaagatgacgaagactgtggaatatgtagctaagagtcttactaaaatcctctctagtgtatttatatatttaagcgtttggtagtacttttttagccatcagcgttctctatattaggttgatacagaagttattgaggtttttgccattgaaagtaatacgtcacttcatgcagaggtggaattggcgctctgagcttgcttgtcaaattcacaggcattcacttttctttcataaacatttaggactctgtatttaggagaggaatcactgtgaatgtagacctcgggttggtcattttcctagtaagatagaccagactgactggaaaagtcaccctcttgggctatcctgcrtatgtggctcggcattgcttccgtcaggataatgcatcagtttcttggacaaagggtgcatttctgctatttgaatgcagacatatttttggatataagccacgcagttgcatcccatttcttccgtaggtaaaggctgggtttctaattgtgattgagaagcttagcatagatgcaatgtccctatcaccagatggctagtgtgctctgccttgtctgccttttaccttagagagggtgcttccttctgacacgggtattgctggagtacacattctgttgcatgaggtcaggggagcaagaaatacaacccagacttgcgctcggaagccctgccttcatttcttctctgtagctggctcccttaagtattaaacagcagtattctaatatcaacgtcccttttttatttgctgtgacttgctgtgactacggtgattttagttacagtaattaggtcactcttcatggagtcgggctattttaagtgcctctttaaggaatattgttgcagatcagtaattttacaattggatgttcttgtgcaactttattaaatgtgatctgtcttttaaatgttgcccttttacagttacacatttctaattgttgctgtaaatgcattatcactttgaaattaattaatttttccattttggctgcctgcaatataataatcactaatgagaaactcacaggaatcaattctcagcacagcggcccctactggtaaagccatgtctctgcctccctcttcttcttcagatccagagaactggacaagtgtattggggcgtcctgggagggaagtgtttgtttcttcctcccttcaatttatggtgaaataaaaatcacagataaacttggaaagtgagttatttttaagtgtcgttctaaaaaagatgcaatatacttcaaatagctgcttctaaaatatgttaaaggaaactaacatttgctgagtactttctaataatgaagtcacatcatacgtgcattacatgtttattttcttgactctagagcattcttttatgcagttaaattactctaaaatgttttgcacctgcacgcattaatgtgtattgtttggtaagaactttcgagttggtgaaaaaatgtattgtattttagtatctatatttatatatacatattagtctatgggttttaattcacaaaaccaggtgttgtatctggtgcacataagggattttcaaggctaatcttgggtttttgcagttgtaaccatgtgtgatgactttagaatcctaccacacttccaaatagagatgcagattgaccattttcccagataccacgatgctttatgtatcagcatatattttcattaatttctcataatttctgttagaattaataattccaagttctacaatcttagaattattatctttattttgtaattgaaaagcacagaaacctcatgcagcgtgttcaagaaaatgatataccagccttgtaaactttcacttgctaattgcagctgcatttgctttgtccaatgcacggtaatgcccctggcatccatatctagttatgcagttatgcttcctttttaaaatgtttgacagcaccttcactgaaatgaatgctgccaccaccgccaaccccaccttttttttttccacataagctttcatttctggtaaatacatccttgccagagttcccaggtccaagccggtcctttgtggaccagtatgcagatttgaagttgagcactgtcacttgcctcttaggagtgttttgtgcaaccacatatttgtgttggcagataacagtagaaagaatatcatgtgttagggtagcaagagcttagcagatgttttagggaactgcattttcaaatcattttacattaaaaaatggcttacgtttatggaacttctgcgacgatcgggttacgtttcctgtgcccgtgtaaagccagtcatcgtgctgagttttaacggatgtgcagctaccctgctaatggatgggccggcaatgctggtcctgttgcaaagttataaattataactagaaaaagcacaagatgtcattcttctaaccttcgtgaaagccaaacggggtaattctgcccttgaataacccgctgcagggtgatttatagttgtacaatttaaaacgtaatgaaggagataatagatgttgatttgttcctgaaattagtattttagaaaaatacttctccccctttccatctttaaatacctgcagctgactacactatagatactatcaagggcaaagccccctgtttgaatgtgtattggtacattggtgtatcacatacaaggcagagggtgtataaaacaggctttctgttgcgagggggaaatatggttttcaaagtggaaatttcattgtattcttcatgaatctaaacattttgagactcctgagtgaggtttgaattttctggttgcctttctcttgccagtccagatatgttagaaaactggactctcaggacccctctgtggttggaccacactggcgctttcctgcagttgtctgtcaacagaaggacctggtagctggcttgtcctcttacaccactgaggccaccttcttgcaggaagaaacatacttcttcctgccctggattaacattaccattggttttagtagtcttacgtcattatgtccaaagcttttaagtttacagtgcttgcttagtccagygaccaatggatgtaagtaagttggaaaaggrcaaaggatttagaatcatgagggttgtattcaaactgcagcctctrctcccttttagttacataattttgaaatcatttgacatttctgaggttaattttctacatcagtttagctgctttaggccgcaagttattaacacccacttaaaggtggctgaaataatagaggttttgcttcccatgtatccagagttgctgaggcagcaagggttgtgtttggctactatatgagtagctcctttgtgataatctttacttttccctcatgcttacaagatggcttctgtggtgccagccattgcatcctatttgataaggtctgaaggcacagatgggagggatgaggctcctcattgcatgcctttttcctttatcaagagacagagcattctgcttcagaactgtcctcctgagttgacttcccgtcagatcccactggttgggactgagtcatctgtttgtatcctagttataaaggagactagaaaagtgcataactggctttttgagcctctagagtggcaggcgaactctgattttgaggaaaaaggatagggtaatggtgttgacacaggcactgttgaatacgtatgtacatattttaatagttttctcattaatcaaatggaaatgctatcgattttataggrtcgttgtgagaagaagtgagaattgaaatgaaaggcatctagtcttccccggtccccatccacttgacccaccatacctcaagccacttctggctccatgctctttctttccttagggttttgaaacatgttcttcagcctagaatactcctcctccactcttaatttctacccatcctgcaaaactcagtctgaacagcacacgtcaaggaagcagttttggtctctcagattatatgaagctctccaatatgttctttcagaacagccagtgcctagaatactgcctgactcstagtagcactccttatgtgttgaatgagtaaatgaagagtccctggaatttcttcttcataacattgaacacaactgcagtttgaaaacataatttctgtagttttttttttttctttttttttgagacggagtgtctctccgttgcccggattggagtgtagtggcacaatcccggctcactgcaacctccgcgcctccccagttcaagcaattctcctgcctcagcctcccaagtagctgggattacaagcactggccaccaaacccagctaatttatatatttttagtagaagcggggtttcaacatgttggccaggctggtctcaaactcctgacctcaggtgatccacctgccttggccttccaaagtgtggtgggattccaggcatgagccactgtgcctggcctgtagtttctttttcttttttcttttcttttcttttttttgagatgaagtcttgctctgtcacctaggctggaatgcagtggtgcaatcttggctcactgcagcctccgcctcccaggttcaagcgattctcctgtgtcagcctcctgagtagctgagattacaggtgtgcaccaccacgcacggctgatgtttgtatttttagtagagaygggatttcaacatgttggccaagctcgtctcaaacctgcctcagcctcccaaagtgctgggattacagatgtgagccactgcacccagcctgtagtktsttatttaatgtctgtccccccttctcttgacagtggtgtttttgccttcacactactgtatccctggtccatacmgtaaatkttctgtaaatgtttgtaaatgaatacatgaaagatgaccaggtgctgaatcagtgagagtccttaatgtacttcttatcatttatccctctgaggtaggcaagggattatagtttagaatgtgtaaatacgtaaaagataaggcaaggagacctgctgagagtcacacagcaagcccccaaggtyccccaggctcatggtcaaatgacatgtaagggacgtatccagyggtgtgggtatgtttggagggaatgaatgtaaggagagagaggtgaggcacaggagagacaggatgagctttagaggtagacagctctcgggtccagccctagctctctcccattctaactcttgggcaaggttcaaaacctgattaagattcatgcataaaactgagatgttagaactacctcatgggcttgtcttgagaattaaagacgttatgaacttaaggcctctacagtgtgctagatgcttaagaaatgttaactactattgttattggcttgcagtagaaattaaagattatgaatgttcagcattcagaatatactagatactcaataascattattgctgtcattattaacattattttccccagctttactgaggtatgagtgacaaaaatttcatatatgcgcatgagtgtgtgtgtgtgtgtgtgtgtgtgtgtgtggctgggcatggtggctcttgcctataatcctaacagttgaggaggccaagctgggaggatgacttgagcctgggagttggaggctgcagtgagctatgatggtgcccctgcactccatcctgggtgacatagtgagaccctatctctaaaggaaaaaaaaaattatatgtattcgtggtgtgaaatgtgatgttttgatattcatatgcattgtgaaatgactaccacaatcaagctaattaacacatcggtcaacttacatagctatcattttttgtgtgtggcaagaacattgaaagtctagtctcagcaattttcaagtatataatacgttattattattactatcgttaactgtattcaccatgctgtacaatagatctccagaatgtattcattctgtctaactgaaacttaggatcctttgaccactatctccccatttatcaccccctcccacttccccactaccagcccctcctgggaactgccctctactctctgcttctgtgagtttgactgctttaaattccacacaaaaagtgagatcatagagtatttgtctttctgcgcctggcttattttacgataaattgattgcttctcttcccattgtttatagatacccattctcgtaatgatggcactgtgtctgtcatagaaggcctaattctccctgttaacattgaacataaaaacctcatatgggccaggcacagtggctcatacctgaaatcccagcactttgggaggctgaggcggatgaatcacctgaggttgggagttcgagaccagcctggtcaacattgcgaaattctgtctctactaaaaagatacaaaaaaattggctggctggtcatggtggctcatgcctgtaatcccagcactttgggaggccgagccgggcgaatcacgaggtcaggagattgagaccatcctagctaacatggtgaaaccctgtctctaccaaaaatacaaaaaaattagccaggcgtggtggtggggcscggtcgtgggtgcctgtagtcccagctactcaggaggctaaggcaggagaatggcgtgaacccgggaggtggaggttgcagtgagccaagatcgcaccactgcactccagcctgcgtgacagagcgagactccatctcaaaaaaaaaaaaaaaaaaaaaaggctgtgtgtggtgactcgtgtctattgtcccasctacttgggaggctgagacatgaaaatcacwtgaacctgggaggtggaggttgcagtgagctgacatcgcatcactgcactccagcctgggtgacagagtgagactgaaaaacaaaaaaacaaaaaaaaacccaaaactatatgtgcaagcctcaggaaccactaagacagattacacaatgctcatcagaactcagcaggcttccacagtgcagattttaagccctccagttgcctgttttactggcaccaagaacacaccttagcttggaggaaacattggccactttcttgttaaaaacaaagagagggaaactagatctgcctttgtgaggctggagcacctcatcaatgtattttttctgccttgctttatagtgttttaaatccgcctcggcctttgttcctgaatgagcacccgagaaggggagaaagtgactmtctggccttagtatgtgtaacaaattatttaatgaacatttaaccaagatttgcaattcccctagttttatcttcccggtttccttttcttctgtgtgcccgttggcattttggtaatgtgctgcctctttataactctttgtagctcttttattacttttcttttttcttttaagtttgtggtgccttctttgatcctcccctctttcagtttccttttctccaatttcatacttatttccagtgatttttggctgcaacgcagtttagatattggaggccagcgtgattaaaccgaggccaagagtttgtattgccccatgacgatgtttctggaatgtttcttctgtgaacagtgatttttgtataactcactggacatgttgatttttccctgtgaggtgtaaggtaatgttttcctagcaaaaacaaagagggctgaaacctggtgctcagaatcgtttggaaacggaactcctctccctcttctttttacaccaagataaagaaatactttgcaaatcagctgagcacatgttcccagctccgtgccgggctctgtggtcatgggtttccttctttatgtcttactcatctaatgtaattttagagtgtgttctctttagataattgtgtgtctctgagcaaatcacttatcctctctggtcctcagttttcttatctgtaaaatgaatcagttaaccaagaatagccatcccttgggttaatagaacagtttaacttgaaaggaaataaaaaaaggagactaacatgggcccacagacattgtatttcataaattttggatgaaaactgaacctaccatcatktattaagagaatggatattttcatgtcagaaattataggaaggatacagttatgggatgaggagcaattcttttttttttttttttgaggtgsagtctcaytctgtcaccaggctagagtgcagtggggcgatctcggctcactgcaaacctctgcctcccgggttcaagcaattctcctgcctcagactcccgagtagctaggactacaggcgcgtgccaccacacccrgctaattttttgtattcttagtagagacgaggtttcacggtgttagccaggatggtctcgatctcctgacctcatgatccacccgcctcggcctcccaaagtgctggaattacaggcgtgagccaccgcacccggcctatgaggagcagttctttcaatggaatatatttgacttcagggagaactcactcaaatgctgctgttactgtttttccctttgttggaagtgatggggttgtacttggaatgactggcctagaaaaccctacaggtaccatttaagctccatagttcttctgtgtgtgtttcggatcccaggttccaaacctgctctaaaacttgttgctgcatctcacctaatcgtgtagtgagccaggtgagctcatctgtgaaatgcagacctttctggacgtaccacctcgtggggtgaagggaaagaaatgatacaggtgtacatcagggtataagctgtcctagagtctggattctttttatccagaagccattctttcagcctgtgcctttttgtaaataccataccccatctatttccacaaaggatttggggcattagsgagtaaagggggaatatgttctagaagaagggcgctcacctcagtaaattgatgggtgggccacaaaaatcatgtcacaagatcttgttgatgtgcatgcattcattcattcaacaaatattattgagcatctaacataagccgggtgctttgctaggkacagaatgctgtacaaggtccctgtcctcatggggaccgtatgttgggaagacagatgataggcatggaaatgaagagacaaaccactccgacttcagcccaggaaggagctttaatttgagtaattgttttcactaattcatcttcacagaaagaaataatatgatcaccttcggttagtaaacaaaacaaataggcaaacaggtttacaggctgaggtgggctggatcacttgaggccgggagtttgaaaccagcctagctaacacggtgaaacccttctctactaaaaatacaaaaatattatctgggtgtggtggagctttcctgtagtcccagctactctagaggctgaagcatgagaatcacttgaacccaggaggtggaggttgccatgagcagagatcgtgccactgtactccagcctgggtgatggagcaaggctctgtcttggggcggggggcagggcaggggaggggggaaagaagagaaacagctttacttacgtttttgatgagcctagcctttgctgtgctttggaaaatgggctgtggaatttggctgaaatagtcaaatgcgtagctggctgtatgtggactgataactgggcttattttgcttcttttagatctggaaagactaagcgcaaaatagaaatgctaatggtattgatgtgtttttcttcctttggtgtgataaaaaggtatcagtagggatcattcataaaactagttagtaaactatcagtttaatgtacaatggtgaagaaatacatacatcatacttgagaccatgttccagagagtattttgtaacctgtgacgctcttttcaagtcttagagaggaagtatggaaagagcatgcgcttttgactgaggaggtcttgggtttaaaggtcraattttgccacttactttctccatggccttggtcaacatcctgaagtctcaggtccttgtctgcctttgctttgacacgagatgttgcctgcctcaggcggttgttgcaaggactaaaatcaggaaggcctggaaagacttggaagcatttctgtcacatcccaggaactccgtaaatgccagcaagtgttagattattgtgatgattttactactcctattattgatattataattaatattataattgttcattattaccttataaaaattacttatgatatgtttttcttactatttggtgaacatcgagtatagtaccaagtgtatacttttttttttttttttttttttttgaggtggaatctcctctgtctcccaggctggaatgcagtggcattttctcggctcactgcagcctccgcctcccaagttcaagccattctccartctcagcctcctcagtrgctgggattacaggcatgtgctactacmcccggcaaacttttatatttttagtagagacagagttttgccatgttcaccaggctggacatgaacttctgacctcaagggatccacctaccttggcctcccaaagtgctgggatgacaggtgtgagccactgccaattatatacttattttaggtgtattatgctgtgccctgtgcttttctttgttatactggaaggtcatgatggcaggatgtcttatttatgcttctctgtactctgtcctgtccagtgcctttcagaagtaaggtttttagaaaggtttgagttatttcctgttttctgaaccagacaggcagagtatttgatcttacaaaaatctggctcagttcaagttagctgtgtagctttggaacggaccctggacagatggattttctaaaattacagaggaaactagatctgtaactctgtacatttactcctgtgccagtaacaatggcaatattttaatactgwaataaattttttcttatgcatttgctataaattagtaaatctgtgtaaagctgcttattgcatcatcatgtagaatttctacatcctgcagaagtttaagaaaattgtcttccttttacagacaaggacactgaagtttagaagtgctaagtaaactgtcttagatcacttagctagcaagtgacagggatggaattgaatctgtatttatcagaggtgaaagtatatgtgtaattattcaactacacttaggtaaatatccgcatacatgcatgcctccccttagactccattgttccaaaaggtaatgacaacaaaaattagtcggaggcggaaggaaatgcaaaagtggacatttactcgagaaagaataaagaaaccatgcaggattccatttcacaaacctctacagctgttgctggggagtcagtggaggggtactggaggaaggcagactttgttctaagctacttagcagccaaggaaagcagaagaaactattattattatttattattattatgtgagttggagtctccttgtgtcatccaggctgaagtgcagtggcatagtctctgctttctacaacgtccacctcctgggtttaatcgatcctcctgcctcagcctcccaagtagctgggattacaggcacccaccactacatccagctgacttttgtatttttagtggagacagggtttcaccatactggcccagctggtcttgaactcctgacctcaagtgatctgcctgcctcagcctcccgatgtgttgggattacaggtgtgaaccactgcttctggcctagaaactattattaatagaagttctgggacaacggccctgctctcattacttgcccccaatccatgcaatgaaatactggcctgtgagtatgtggtcccttcagctcattttctgaagctgaccaaaggagcacagtaatgcataacgggggagtaaaattcctcaagacgagcaaaaaaggcagaaattaataaaactctatgtattagttatctatcactgcataacaagttacctcaatatttagcaggttaatacaatgcacattcattattttatagcctttgtagattaggaaccagccattgcttagctggaccatctgctttagagtctcacaggctgcattcaaggtgtccactgggctggggtcaacttcttaccgacaaagctggtgccccaaaagaatggggtcttatcctgttgggtgtcatgaagccaacacacaaaaccgaaagtagtgtcaagyagtacaggctttattcaatggccatggaattgagaagcaggagcatggctcacaaattcacaaatcagcttctccactaatgaggggtgrggaagttaaaatatagactttgttgttgktgctgttttaatgaagaggctggacattaaaatcaaggggaggaataatcatgtcttctcttgaaatgggcagtgaacttcccggaaccagagtgttgccttcctttttatccttttatggctgcttctgatcattgtcatggtgattgtcaactgtcttggcgctggtgagggggctgtttagcatggaaataggattataatgacacctgaggtctttttgaagtccttgggtcggctatcttgcttctaacaaatctcagctggtctggttacagagggaactttttatcacaggtgtcctgtttcttaaagataagcagtgttattacagggtagaaattcacctatgtcaagtaggcattataccaggtaacaatctcaagactcagcagggaaggatccacttgcaagcccacgtgsttgctggtaggactcagttccttatggcccagtggattgaaggcttcctttcctgcctggtgtttggttccttgccacgtagggatctccatcatggctgctggctttatcgaagcatgtaagccaagaaggaaatagaatccattggtaaaatgaaagtcacagttctttgtaatgtaaccacggaagtgacgtcttactgcttttgccatattctttttgttagaaggaaatcactgagtctgatcgttgttaaaggggaaaggatttcacagtggtatgaatcctgagaggcaggggtgatcagggccagctaccacactctacaacttgaattttgttttagatttcagtgccttttggggaccctgctacattgtggtagatttactcacaggacttgatgatttttcttgacctgcctgaagccatagcatttattacggataagtttgtcttttcttcgttctttttctgtttgcatcctttcgtcatccttttcttccctctttctggactgagagaggcaccaaatgcacccatttaaaacatatatgcatttctgctttctgatgggaggtaagatttagtcatttaataagaaagcttatgaaaagaataaacaaactggtagataatgtatcctaaagtcaagtatttgctttcatgttgctttagtagaaggggcccttgttaatcgatggcccaaattgtctttctcaagaaatgtgtattgcagaatttggatttgagttacaaaaactagccagaaagcgtgaactttttttttttttaagccataaagcttggtaaggctagccaatcatttcaaagcctgtgtagaatatctagactatwtgtaatcctaggatttgttgttgttttgttatgattttttttaagcaggaagctwaaaaaaataaccacccgttactttgctgcttttagaaaataggtttgagattgattttgaatactaaagtatagttttcatgttataaagccaaccatgttaaaaatgtataataaagtatctaatttagcaaaattcaaatttcccctatgaaatatcaagctctttttatgcttcttcacatggcaccttgtgtagaatttgaaccactttaaacattgcatccttgagttgcatatgatgggatctcttgaatcatttacattttgaaaaaagaaagtgaaatattctttaagaagccaaagtamtccacgagaatgtatggtgtttgttcagctggatatcttatttatttgaagtactgagagagaaatcttttctgactgctcaaaacagggaataataaacagtcagagtgtccaagtaatctgagctagaaagttccttctttcagagaaaagttataaaaagtatwtttgccggatccaaaaaaaatactgtgtatsaactmctgagacctgcataatgttttcttagtattctcactctttaaaagaaaaaagaaaacctgtaaaatttgggaacttaaactttttttgatattttaatatttctaggcaggtgagtgcaataagtctgttttttgatcttagaacataacatttcttgttggctattgtgtgtgctatgtgtatgatttgtctctttgttaattctctataaatataaaagagcaagtaatgaaattaccatggctgaattctgaatattaacccagagcagatttcctctaagaaagatcataagaagatgcttaaaagaaaacattatatttcaaaagaattaggttctgaaatatacccaataatgaaaacaatacaattttcttctgctttttgtccttcctgttccaagcactgggaaggagctggcatatttcttatgtatgaaaagtagaataatatattggattcctttatccctaacccggaagagtctttcttggactgtggtttgctttcccgttatacttaagcttgtttattgcatcttccgatgtcacattatctcattgccaagctaaaggctctgttgggttcttagttgaacccagagtggaggccgatttcatccaaagccattttttttaaaattagaaattaaactcacctttggcaagtcctcctgaccagggatgggtcctcatgttagtctgtaatgtgaagatatgaaatgtatttgatacaataggagattcactgtgattttcactgaatgagtatacattctgcagaactagaagataaagataataaaacaattcacatttcttaggactaatttattttccacagtccactaccaacatggtgggatggggaggagctgagaagagcatatttggctgagtttggttgcagaaggatgcaatgtgaggtagcagaaggggctgtaagaacacaggattttgaagttgaagaaaccagcctggaatgaatcccagcccttccttttagtgacctgctggccagccacattacctccttgggctttggattttctttttcactgtaaaatggggaaagtagctcccacatctttgggctgttggtgggaggtgtgcaggacacagctgaaacctttggtgtatagtggatactaaagcaatgctagtcttcttcgtgtgctaccagttagaatgaattttrctgacatcttactggtttctgagggtatacagacacttattgtcaaagatattattgattatctgatccccaaacatatggagttacatcacagcaggtgagaaatacccttcaactcttgattctaaggaaaatccttggggagccgccatcattccttccacgaaggaatgaaattataacgtaatgtattgttggagcccttagttcaacactgtcttttttcaggycatattaatgsaatggttagcatatcaacttccttctgtttttagtgactctaatacattatattcaccttgttctctgcatgttctttctttaagtcatgttagatcccttttttggaagcaggtcaaatttgaattaataaaatgatttatgttgaagtacaggcatatcccacagaatctcttaataccaggccaaaagtaactttatcttgatctgtagttcggacatatttcttggattgtccgcactcawaaaaagagattgcgtaacaccctttgaacaaatggatatttgagaaccatcctgtcttcagatttagattttttcaatttttttttactgtcatatgattcacatgctagttactgattgctatcatgcagtctgccagcagaccagatggcagatcttttaattagatatgtttgtgtgtgtatgcatgtgtgtgtacatgtaatcacagttcatcaaggacctaataaatacttttttctctctctctctttttttttttttttttttgagacggagtcttattctgttgcccaggctggagtgcagtggcggatcttggctcattgcaacctctgactcccaggttcaagggactctcttgcctcagcctcccgagtagctgggactgtaggcatgcactaccacacctggctaattattatgtttttaatagagactaggttttaccatgttggccaggctggtatcgaattcctgacctccatgtgatcggcctgccttggcctcccgaagtgctgggattacaggcatgaaccactgtgcctagccttaataaatacgtatttatgtctttcgatctttttctgtttttctacattccgtttcccctatggctgctattgttttccagtgagctatttatatatatatatacatatttttgagagggaatcttactctgttgcccaggctaaagtaccatgtcaagattatggctcactgcagcctcatgagcctcaaccttcttggcctaagtgatcctcctctctcagcctcccgagtagtttggattacaggcacctgccttcatgcctggataattttttgtatttttgtgaagacgggtttcatcatgttggccaggctgcagctatttatatcttatatgtgtatttgtaaaaaatttattcctcagccctgtgtggtagctcacttctgtaatcctagcactttgggaggctgaggtgggaggattacctaaggtcaggagtttgataatagcctggccaatatggtgagaccctgtctgtactaaaagtacagaaattagttgggcatggtagcggtgcctgtaatcccagctgcttgggaggctgaggcaggaaaatcgtttgaacccgagaggtggaggtggcagtgagtggagatcacgccacagcacttcagcctgggcgcatgagcgagactatgtctcaaaaaaaaaaaaaaaatttcttattcagttgatttaagatggtttataaagacaacatgagctagcggtagaaatgcgaatggacgcttgtagacagtaaggactcaatacgtgggtttgttcaagttatattgtgcagacaggcatatgcagttagaaaatctgtctagggtagggagagataaaaccagctacttcagccctgctatttttatcctgaagattttttttttactctgtttatgaataaaacattttaatcagtgctgtatcaacactgatcaatttttttcatggaagtgtaatacagggtgaattccattaagtcaattaaatacttagatccagtttttaaacagtgcgaagatagttaagctcttcttttattgaaagcctttttaccaaaaccatttttttttattttatagtgaagatttcatgtatctgttttctgtacatgccaagttttacagctttttgtatcatgagttttcttttgcatcaattatttctaccaagtccaacttgtagattgggcagatctggatttcaccacacctggtttttgttgtcattgagtttttgtgatggggtgatttcagtgagaaatatatgccattaatttgatgaaaaatcagtatttatttattaactaatacccaagaaattccccagcaagcctcttccagtattctagagtttctcgtttcttgaggattggtctccgggcatactcctaatctaattgtttcccaaactttcaatgttttggatgactttggaagccttgatttctgtaggctgtagcaggacaaattctgatggacagatcaagatgttctatgttgctctaaaacagcatctctcaaacttttttggaccactatctaagttttttctgttaaaacccaatacatttatacttatgtatattcgtgtgtgtgtgtgtgtgtgtattatatgcatgtgtgtgtatttgtctgaaataaaagttttacaaaatgatacttttatctgagcagtgtcctgctgttttttttcccctaggttgtgtttttgtgtttttgtttgtttgtttgtttctttgtttgtttttgagacagaatttcacttttgttgcccaggctgcagtgcaatggcacgatctctgctgaccccaagctccgcttcccaggatcaagcgattctcctgcctcagcctcttgagtagctgggattacaggcatgcgccaccatacctggggaatttttttttgtatttttagcaaggttgttgatcaggctggtctcgaactctcaacgtcaggtgatccatcctcctcagcctcccaaagtgctgggattgcaggcttgagccaccgtgcccacctgtgttttttgttttgtttttgtgtatgtgccaatgatgacccagtttcaataccaactgttgctttcaccacccactattggtttcaccaccccgctagatcacagtctgttctttggcagtcactgccccaatactgtttgatgtgctcccctctgataaatgttcattgagtgccccacatgtcaggtactgacttaaggcatagcaaatgcaaaaatgagcaaggtgttctcttggctctatgggtgcctaccttagaaggatggagatgggaagaatgtgaaagggaggtgagatgagcagcactgggatgtgtggcttttctgtcttgaggatagatagaagaggagtcagataaagttgcagaacagagatgacgtctttactgagacttgaatgatgtgtcggaggcaaacatgttgacacaaacgagagaattttaggttctctttgtagctgtggctgggctgggacaaggacgatggacaaagttatgggggtgctaaaaacctcagtaatgaagataaatgatattctaatctaatattttaaaaaatcgaggctaggygtggtggctcatgcctgtgatyccagcattttgggaggccaaggtggacggatcaccagagttcaggagttygagaccagcctggccaaaatggtgaaatgccatctctactaaaaacmcaaaaattagctgggtgtgtggtagtgtgtgcctgtagtcccagctactctggatgctgaggcacgagaattgcttgaacctgggagtaggaggctgcagtaagctgagatcatgccactgcactccagcctgggttaacasagcaagactctgtctcaaaaaaaaaaaaaaaaaaaaaaaaawtcaaaattgatgcaaaaaatatgataacatttcaaaatttaaatcaagacaaattcaatattatagcaaaggttcaagtaatgaacatgaatttgtaatgatgcctgggggaggtgaaggttaaaaaaaaaaaaaaggccaccaaggacctcatgttaaagttgatgatgacggaagtgagcagtgatgatgagatttaaaaaactaacttttatttttacattattttaactagtatttgtgttaacattattttaatctcctgtgcacttaagggagctggcataggccggcagtggctataggccaggacctgtgctatgtagcttatctatttctcatgctgattctacttttgttactaccgaaggagcttagagggaatcagtgacgtggacaaggctatgtaactaaagggggtggaggaggattcaagccccttgcaacggactgaagtgcccaagctctaaatccctgccacccacagcctctgttggccccaggttgtgtctgarattcaraggttgtttttatagcagcaacacagtaagttgggaagagggacacatttttaacatagacaccaaaagagaggctggaaragttgaccacttaraaatgtcacgagtgtctgtgaatagtgttgggggctgagaggcaagagaagaaaatagtcctaatgttgtacaagtagcaatggaaacaaacttgttaaaaaaaatttaattttgtttatgcatgtgtgcataaacaaagcaatagaaaatatttgatatttaagattgagcacttaacaaaatactttgtctctttttggtttgctgtcttaagcaatagccttaaattcttgtcccagggatacctgatagagctaatatagaacaatattttaacataatttgaagtatttttttcttctgatgggtatgtagttcatttttataaaaaaatttaaaaattctgaatctgtggtgtttctgaaacatcctgatatattttttgttgatgactcttaacaaaggatgtaagacagattctaagaagagaaaaggtagaatatccacatgtctcagtttcataatatgtgtaaaaattatcatgcccattcattatttaaagtgctgtggctttttagtgaataccaacattaacaaaccatgttaacaygatttaaaatatgtaatgaaatttgcaatgcatcagatgatggaactatcaaattagttcacgtggcgttggctgatcacccttatgaagagttacttgcattgtttgaagagggaagatgcacatccccttgtgggctggcagcatttttgctaacactgccttaaatgatgctactggcaggatggttaatttgatgttgaaatgtcacacaatatgtgcccaccctacgatttgaatcttctgtgccgttaagggaattggcagtgttcagacagaatggtaacattctctctgatcgtgtctgtgtctgcacccttttttgttttgtttctgttgtcttcattaatagacctttcaggaaccttcctgggatctcagataacagttcttctggaacaggattatccagaggtagcaaaagctctcctgcaaatattccattgcacgactttaaataaagcagcaagaagtcttttcattcagttcagatttgctacttgttctcttggttccttcaaagtaatgactaagtacaggtctttagatagagagctgcaccaaccaggtattgcttcgtgtcttccacgtacgtcctgagaaagcgaaggtgaatttcaccaattggtaggtggaaatagaaaaactgttgattctttttttcattcaccaatcttttttttccccaaatgctaagctttatttggggaaatcttaacagccgtttttataagactctgcatttacaacatttgtgggggctgcagaggacgcacatgaaaataacatgaactggccatgtacggtggctcatgcctgtaatcccagcactttgggaggccgaggcaggtggatcacctgaggtcaggagttcgagaccagcttggccaacatggtgaaacctcatctctactaaaaatacaaaaattatagctgggcgtggtggcgggcgcctgtagtcccagctacttgggaggctgaggcaggagaatggcctgatcccgggaggcggagctttcagtgagccaagatcgccctactgcactccagcctgagcgtgagactctgactcaaaaaaaaaaaaaaaaaaattagctgggcgtagtggcaggtgcctgtaatcacagctatccrgaggctgaggcaccagaactgcctgaacctgggaggcggaggttgcagtgagccaagatggtgccactgcactccagcctgggtgacaaaaaaaaaactttacctgggcttagtaagttgcctgacttctcatcctggagttcgkatccccttgtttctagaagagaaatccctcagatgtgaaggtgtgttccatgattttgycgaacttgccctacatactgttttattatatattctgcccacttctattccctgccaattaattaattgtttcattggtatagtttttttttttttttttttgatacagggtcttactgtgttattcaggctagagtacagtggcgtgatcacagctcactgcagtcttgacctcccaggctcaagcaatcctctggcctcagcctcccaagtagctgggactattggcaatgccaccatgttcggctaatgtttttrattttttatagagacaaggtttccctatgttgcccaggctggtctggaactcctgtgctcaagccatcctcccacctcagtctcacaaagtgctgggattacaggtacaagccaccatgtcaggccattggtataccattgtttttcttaaacatttatttattttcttatatttacagcatatgtggtcatttaaaattattttatagcatataaaastaaaaagaatataaattaattttttagcattaatattagggaagataatctgacatttaaaaatacatgtctatatgtgtatacatacatagaagtatatatataaatacmagtactagtgtctgctaataggtggcgccactttttatctgtgtgtgttgggggtggaatkagcatgtagaggttggcaaaggggacaggagactgtgggatgattagtatattcttatttggcctgggagggaaaaaaartctttcatttccaacaatattcwttctctgtgtcacctcagcatttaatttacttccgtcacaaaactacttgaagttgtcccaggctagttggtcctattaattacaacctagagggattctattartaaactaatggattacagtacctaaatggaagccagcagatgactttggaaggactgatccgcaagggccttctgtgtgaagattaaatgaagcttcctttagccttctcaggtggccacagtttcccataaccttagagattatctaggccaaggctattaatttagagattaagaagccaaacccagaaaggttgaaagactgtcgtaagttcacactgaaagagagtggtgtaatgcccttttcaccaggctccaagaaatttgcctattttatgttttaacggacatggtatccccagcatttttaataaatgcccttttcttgcataagtaactggatatttccgagtggcctacaagtggagcgtgatttcatctttcatcaagagaagcagcttttcctcctcttgtatccgttttcttccttttctaactatcaaggtcatgcggtatstgccattttgcatattcttgctttgcttcatgttttccttaaactctgtgcacatgaatatttgtggtatatggcttaattgtaagcgatcaggcatcaatggctttttatgaggcaaaatctactttctrcatttgcgtgtgccattattatagattgctgatgtttgccaatggatattcttggaagtcgtcttctggtttaaatgcagttaagtatttaaaaataataccagtgacatgtttgcatttacattcagcctgaaggcctacttgatgctgcaactgaaaaattgttagactagattttattttattttaattctttttgagacagggtcttagtctgtcacccaggctgctggagtgcagtggtgcaatcatggctcactgcagtcttgaccaccctggctcaggtgatcctcccacctcagcctcccgggtagttagggctacaggcacacgccagcacacccagctaattttttgtattatttatagagttgggtttttcaccatgttgttcaggctagtgttgaactcctgggctcaagcaatccgcccacctcggcctcccaaagtgctgggattacaggcatgagccactgtacctggactccactatgccttcccctccccttycctcccttccccaccctaaagagtctcgctcttttccccaggctggagtgcagtggcactatctgggctcactgcaacctgtgcctcccggattcaagagattcttgtgcctcagccttccaagtagctggttttgcaggcatgcaccaccacacccagctagtttttctatttttagtagagrcggagtttcaccawgttggccaggttgttctcaractactgacctctcctcggccttgcaaagtgctgggattataggtaccccgcctggctgatactttccttagttgttttcagtgtaataacctgtcttcagtctactytwtgtccttttctctcctttcctccctgaatactcaagcttccagtgcacagatttctccaaccctgaatgtgactgataccaacaccatactagctcttccacagatgcctgtttgttttgcagaacactggcctgaatgactcagacttggagcttgaaagagggagaactgatgtggcctgtggcagacgtgtccaatgacctgctgtgtccttgcttttgaagaactaaagagtagacttgaccactttttaaacatgacattcgatccacgtggcatagcaaggatgggatccacaagatggagtgatctttacgccatcctcctgaccataaatactaaaygaatactctatttcagttgagtttttagtttgctctgttacgtgaggacacatcacttgcacctcagtgtgagtttgaaagtgttttctctggagaataattctgaagaaataggccctccagatatcrgtagtgacagggstatcagtaatgttgattactaagttcttgccacaggtagaagccatgctactgcacaagtttcatacttgaagagtggacatctgacacagtgttggtggttgttgaagtgtatgactwttactgtgttgctttggaagcttgatgccataacaaaagtgcagaattccatgtttgataactttctgacttgatgaaaatgaattgtggatacagatttcactatccatgaattgtggccttaactttctcatgtacttactttaaatcagagagcccacctgtccaattctagcttctcctgggcatyctgtatttgacacagcccctcccagcattctgagtcaycgtctgctgctcttgcactgtccgttttccaaatgaggaactcatcggtaaggccagaaaggaaagggagaaaaaacaaacaaacaaacaaacaaaaaataggaaaaaaagaaagagcgtatttatagatggtagagaattctgggcatgagaaacccagccaaacaagtrgaatgtgtgcataggtgggactgctgatcttgttttatgaaagaaataaaggcaagtcaaacagatcctttcgcaaggatccccatgtgtgtatgtctaacccagtgacaggtaaggcagccaggagctgctgttatttcagtgcaaagctgttttcacaatcacagacatgcacagctcaraaaccctcacaggtcacgcctgaataccttcaatgtgccccatgtaaaaatacactgcaagtcgattggacatgccctatgaattataccttatttatgatcgtcgagccctcccttttcccgtcatgctttagaattatgggctggagcagtttttaatactctatttattttaggggaggaaaatgtttttctttaaccacaacattcatgcaataccaactgctggcagtttccccagcatttaaggaaatattgttgtaagacttttatgttctgtacttcaatcagctagagccagcagtatcccaatggaaggaccctcaacagaccattttcagcattttgctacaattaaactcctctggttttagccctcaggcaatttagtacctttttacatatgcacattatgaacttttgaccagggtctagcagtcatatattagaatgctgctcttgaaggcaggcttaacaagttcctctgagtattacagttggagtcagttgtggaaaaggtaatttaagcaacttgcagcgaggccattcagaatctcagcgatgatcctaaatatctttctctcttgctcacgctcttttttttttttcttgtttcctctggaagctggtagcaggagctttcaaagtctgtgattgatcttttattcagtagctaacgagggctgtgattctattagcgcactacaaggcaagagaacagtgatttaatgaagtgtctagtgagccggccatagatttatcctgttgtcgctaatttgcagcgcacttgccagcataaaggaaactgcactcacactgctattaagcaggtatttccttagtaaattgttgtaaggtcaggtacagttatctgagcaaaagcaatgccttacctcttcagtgtctgcaaatgacagccgccgtgctgagcgctcactgaagtggaaccgggagatcagaggtccgtctccaagtcgcccttagcggaggcaggagcagatgaactgccaagtaggagtaatagagtcataattggtgattagaactggaaaggtgcaataacatcttaatacaaactggcgtatgttatagttactgtcagttgttgtaaactcgtcctgccgcctggactagttacgcttcccttgattagctctgagaaacraggcagcgggcactggggcagccacatagacaacatcyaaatttttgttgctttcctgggtcttgccctgtccttactgtttcccttgggcacgctgttcaccccttaggacatactacagtaaccttttcccaccaccgtgggaggactgtgattttgtaaatgtcytctgatctctcctctttgcaggcgcagtgacatttatgcacactggctttgaggctcattgatcttttgttttatttgcctttgctgaggcaggggcaggtctttgtttcatgtcagatccgtatcccactgcaattctgtgttactgtaggagatttggggttggcatgccagagtgaaaacgcgaaagaaaataaacaggcagcactgaggaattatacacttgagcttggcatttttcttaacgcagggctattttaggtgcactgcgcatgttggaggtgcccttgcaggtataggtaggcattgtccatccrtggtaaaaagcaatagaagaaattcttacccgatgcttaatgaattgccaggctggttaaaaaggataacccttgaaacctagggtgtccaactgctaatttatatagactggagatatttccatgcctcgcagcaaaatttttctttaaattcacagaagcagcagctatccagcattgtccarttgtgctgagtagctgtcattattgataaacatgtaactggtcatttgtattgttttgagtaggatatggcttatcaggatgcatagtagagaaaaatgagatgaggtaatgagatcacatacactgaagcatcttacgaatctggcacatagtaggttctcaataaatcttttttgattctgtgactgttagaatctgttggctgatactctgtcatctggctctcactctgctccataaaacttgggtaattctaatgcttacttcatcccagggctgatgtgtgttaggttagggtttatgatcaagtaaagagtttaaagaagtgttttatgagggagttytgtttgcaaatgatcacctggtaatttaagagggtgagctaaacttcctcmttttctagtatggacctttggggctcaggatgaggatgttcamtttgtactgctggtggagctgcctttccattaagtgagtctttctccaagggaacagaagtcttaggttgttgatctggckgtcagaacctaggacaggcaaggcagtgggctgttgtagagkagatgaagctgatcagagcacacccacaccagtgacaaccggtcaggacctgggaagggctctgacccattcatctgagagatgtggcatgaggaacactgagacctaatgcttattgcttaatattgtggacaagggactctgtgggttgtctagtactaagcagaatggaagggaaggatggaaggaagagagggagagacggagggagatggaggatgacagggagatggagggaggcaaaaagaaaaagggagaagkawagagaggaragaggggaagggaggaaggaaagaagagagagaaggaggaagagaggraagkaggcacagaggtagagaggcagggagataatggagatcctggccaaaagttaatgctccgtttctagtagtccacagaaagcaccttgaccaagtgactgaatacaaatcgtatcacaaactactaggatttcttgggtgcttaccatgtgccatatttccttgaatcttcatgacgatccttcaagggatccttgttttctaaagggtaaaggtgcaggttagaggctatgtcagaagcaagtcaggatttgaaggcagatctgtctgcttttgcccctctgtaaatccagagctgctgcctcatttcttacrttgcccccacccrtgcagcaattcttcctgggaggcctcattgttcatattcataaagggccccattcagtctcctttttggagaaatggccactgcaactctctgttctgacctggggggaaatgttagaccctcaataaggagaatcagagaaagaagaaataaaacatattactccattcccatacttctgtgaagaaatacccgagactgggtaatttataaagaraaagagatttactgaactcagtcgtttcacctggctggggaggcctcaaaattatggcagaaggcaaaggaggagcaaaggcacatcttacatggcagcagacmagaaagcgtgtgcaggggaactgccctttataaaatcaccagatctcatgagatttattcactatcaagggaacagcacaggcagatcccatggctttgactcagttacctcccactgggtccctaccatgacacatgggarttctgggaactacagttcaagatgagatttgggtggggacacagacaaattgtatcatagaatcataaaaattgctatttctaaggcagatgaataatcctggttggaaatcatactgatttagacttaaaaccattcagccttctttaccatttctgaatgtggccctgagggaggatttgtcttttgctattttctttttttaagagatggggtcttgttgtgttgcccaggccactctccaactcctaagctcaagcagtccgcctgcatcggcctcccgaagtgctgggattacaggtgtgagccaccacacccagcctgggggagggtttgttaaagaactgtctgttttatcacatgaccacaagttaaaatgttgggcaatgtccctgaatgataycttttcattagtractcacatggacccataatctctgaatttaacatgcttttcaggaatgtgttcatattttccacctataaaacctgttttagtaatttactcccttgtaaatgttccttggtatgtaaatttagcatatttccttttaattgcccaggtaaataatacccaccatcagagggcaccagtagtgtaatcaccttattttttaaaatgtattctgtgtttcatgattttttctgaataactgatctttacagtctgaattgcattctgttgggcttgacttatttttaaattaaaagagactaacacattaaacactaagaggtcacataggatattccatttatataaaatatgcagagtaggcaaattcataaagacagaatacgcatcggtggtttctggggcggcggggagtakggaaagcctgttaatgagtacawgtttctttagttttttttggttttttgttttttttttgagacggagtcttgctctgttgcccaggctggagtgcagtggcaccatctctgctcactgcaagctccgcctcccaggttaatgccattctcctgcctcagccttcctagtagctgggactataggtgcccgccaccatgcttggctaattttttgtgtttttagtagagacggggtttcatcgtgttacccaggatggtctcgatctcctgaccttttgatcagcctgccttggcctcccaaagtgctgggattacaggcgtgagccattgcacccggctattgggtacaagtttcctttggggtggtgaaactgttttggaactagaggtgatagctctacaacactgtcaatgtactaaatgacactaaattgtacactttgaaataatttatgttatgtgaatttcatctcagcaaaaagaggctaacacataaggagacatattttgatacatgtggcatattaagctgctgytgttgttttttaaatattccagctgcgtgcagtggctcacacctgtaatcccagcactttgggaggctgaggtgggtggatcacttgaggtcaggagttcgagatcagcctggccaacatggtgaaaccctgtctctactrtaaactccgtctctactataaatacaaaaattagccaggcttggcgctgggtttctgtaatcccagctacttaggaggctgagacaggagaatcacttgaacccgagaggcagaggttgcagtgagccgatatctcacctctgcactccagcgtgggcaacagagcgagactccgtctcaaaaaaaaaagcacaaaaaatttttttcttccatctgtatcacacagttgcaacgttgtagcatgggcaggaaataattgggttgtatgtaatgcccagtaaagtaaacagatcttagagagggacaccgatccctaccctgcatggggttattcacagagccatggggacactaaacgtaccttatctcttgaccatgcyattgattagttatgtgtttgcctgtgttattaataatgtatacattgaaaaatctatgtgcattatagtctttgatcttgtcatgaatttcaaagccaaagattccattttccttctttttaaaaaaaatttttcaaagaggtaggctggaagtaaatttaaaaattttcccctttctggcagagggcttttttctgatcaccacccatgttaattagatatgcatgtatgtgtatgtatgatgtatatacccatatacacwcagtctrtatatacwtgtatgcgcacatacacatattttaaggaragaattataaaatgatcaattcaagcttactatatgctagaggtgaggaatatttgaatacaagtcttatctagtagattaaaacagaaattaaagactgtagactaaggcaggatcaaaggacctcttttcattgttcttttattgtttattgacttcaaaaaagactttttagtttaaactgactgtaatgtctcttgaatggtcttttgtaaaatgactttgaaaactcggggataatgtcttcattaagtggagaaaaatcttggggaaaatataactgtaacttggctttcattagagtagaaagagataaagctttgcttaattaatgtctgttttccctctgttcagaagtataaggaaaaaggggactgaaattagtgctgataaaagcttgaattagacattatagcactgaaacttctttttcttccttacttagaatttggaagaacatacttcatacaaagctatgaagcatattggaagattttaggtgccctgtcttcctggatataaaatgactccaaactcagtgatactgatcaccctggcttcttttccacctttctcacttcattgtctttttgtgtgtttctgacatctgttgacaaatgggcaatcttggggatggggggttccactggtatattttctttactgtttaagaaagctcaaaattctctctgctcttttccaagccaccaatcaaaactgacattttctaagtgtcctcattgccctctgggaatgttcatggcctctgggagtccaagaactacctttacactggatcttcactgcttttactattgtgtggctttctaccagttctctgctcagcttctcttttctggagacctgatatgctttgttagcttagcatgctgttctaggctgcctttcttttttttttttttttttaaacttcatggtgagcagaacactgtactccagactgtgaggccccacctgtgcagcctgctggcttctcataccagcttccttctcaccttaaccccacgtattgttgcaacggcaaaaaagagaattgcacagaggaacaccacctatcagagttcacactgagtttgcagattcatccttttgcttccagccatcccatggaatgctgttcttggaagggtcatctcatggtccattgtcggccctcttagaagagatttcaggccttcccttgtagcttgatagttacagggagtgctagggtaagtggaaaaagcacatgacttggaataaagacttagtacacatcccatgtctgatttatactaactagttcatggacctagcctacgttactgcacctgtttgagcctcagttttcctgtctgcaaaggagggatgatggtacttacctcaaagaattgtagttggatcaaatgagttggagtgggatacagcaacaatctatattctgatttcagcaacactgtgcagtgtaattccatattatattayaccacatcttctgtgggtctttctttgggggaagctaacattttaaaaggtttccctttgtaacctgtaaccccctctaccccaaaagtatattcaagagcgaaacttttggtatgacgatgtcttacatcagtagttctgaatgacttgacttagctatctttcttgagtctctcaaaagacagatggatggatagattgattttgttgtaacacctgttcagttttgctggccttactcgttttcaaatactcaaatgccattgagtcagatttcagaggcaaatggtgatacctcaggtttgaagttgcaagaagtcaccacatgcttrttatggaaatcgtcagggatatttattccctctcctgagaagcataattgagcctccaaaccacccatcaagatatccacctgtaaaatatttaagaactggtactatgaagacatttcccttatgcaatttgttttccatctaagagcagaacaaggaaaatatagctgactataagttacaaaggcasactcttaagctacaaaatacatctcttcacaggagcacttggagaagggctgaaggcaaaccaaaagtgagcaacaaggagactagtgttctgaaacagagatgacaggctccgcagtgagggtgatgatggtgttacgaattacccattcagtttaaactagacattccctggaagcatgtcatggggtgtgcagaagggcttttggataaaaggggtctagttaagagatgttaaaaaaacaaacttgaaaagcatagcaggctgccaggacatgtctgagtaccgcgcagatagtggggaatagtctatggattctgcttacaccatggacarccaggctgggccatgggttgtgttttttttcctctcattttatagaaatgttaccaggcatattttccctgtttccctaagaagagcttcctctcagtgctagccagccacagggccaagtgacacctagaggtgatcctttggttatttgctaaacagatctaagacaaaccgatatctgtaacctgggattagatagagccaataagatgtaactgaaattctcagggattctaagacatctacattgtatgttggtacgttattgaaggtgatgctagctgctataacaaataagcacgcctgtgcacagttgctcaaagatagtagaagtttatttcttgtttatrtaagatccataatgactcttgccaattagcaggctgctctcttccaagtggtaacccagggactcaagctcttttcatcttgtggctcagccrtctgacacatgtggcttccagcactgccctgctgttgtctgcacaaagctggtggaagaagtaggaatttgcaggaccatgtgtggagcattttaaggatgaggcctgggagtggcacaaatctttgaactccaggaggctaggaaacagagcataaccttgtgcccaggaagatgcggggcatagtacatctttgcctcacctgatgtattgtttgtttaaaatcactttggattctcatttaccttttccccctcaagatctttgtttttgactttggagataaccagaaataactaagcatgcttcsttccctctacgatttcatcctcatggggaagcaagaccccactcttttattttcatgtatgtatatatgtatgtatgcatgtatgtatgtatgtttgagacagaatcttgctctgtcgcccaggctggagtgcaatggcaccatcttgacttactgaaacctcctcctcctggattcaagccattctcctgcctcagcctcccaagtagctgggattacaggcacgccaccacacctggctaatttttgtatttttagtagagatgggggtttcaccatgtgggccaggctggtcttgaactcctgacctcaggtgatygacctacctcggcctcccaaagtgctgggattacagtcatgagtcaccatgcccgaccagcaagaccccactgctattgtccagtgtggtaggtacctttgcctaccttctactctacaggctggaacaggtgatattgtgcctacttcacagccttcctagcaactgaggatggctgtatgacagattctagccatcaagtaaaatcagaaaccaacagcacgtttccttgaataccttttgctttctataaaatggtgtggcattgctggtattttcactcttccttcctaccctggatgctgatttgatgcttccagccttagcggtyttcttgcttctaggactgaacagggaagagggaaaagtcaaaagaatgacagaaggtcctcacgttgcagaacactgaccaatgttggcaactacaagacaatcaggcgtgattcttcatccaggatctgcttttccctgtcctgccaattcttgagctgctaataaacattctgatgcaaacatggaatacagatttcagagggattctgggtagccctcggagatgaggatgctttgcgaatgtaacaggcatctctcacctcatttgtctggtggaatgtttacaaatgctaattaagttttgcttcaaatggggaacagtcctgtgcagtgtttctaggaagttaccagcttcatcataggaagacgttctccatcgtttggatctttttcaccagcaccttttgrttgtggtggtttgggatgtgatgatctcagaactttacatcctccatgaaatctctgcagcgatagttgaatgtcttgccttttctattattgccctttttcttctgtgactttgtactgagacacatttatattagggtaatggcctcatgctatttgaaaatctttatttgggccacattggttggaagataaaaatatataagcaatagtccctgaacatcatttggcctgaactaggctagagtttctcttaatcaaaataataacgatgatttttccatgccaaggagtggtgtcrtatcatgaagtagatttatgtacacattaaataaacttttacattttaatgtaccaatttgcaatttttttttctattcaccaaaatattccagataacggttatcagtttttgattctacacatacttcaaatactattaatgcaaaatccttctttagaaatgttacctaattccaatgtttcactttattcagcgaagacattcctttgattattctggttaggtgttatgatgccaatttgcccacacattttttcttaggcgcctatgcttgcagtagacagagagttgaggaaagctcaaggttaaaacaggaaaaagtaacacagtaaatacctatttttgtgcataattcaaattaaaaccccaaccacctagaagcaccaatacaaggaactggctgcatattgcattcctgtgacctgctgtcttaatgatggaatgactaacgaggatcagagggaatgtggtcagcctcttatctcataagccaaatgctgcatattccaagcctgtcaattctgaaagcccttgttcatttttaaataatgaaaaactttggggccttgttcattgtttctaaaggaagacatttagaaaatttagaatataaatttctgttagtagaaactaatttctcttgcttttctctaaagtatacttgatttgaaatatgtgccctgaagttttgctatgttgaaaaaaatgatgagccgggcacagtggctcacgcctgtaatcccagcactttggaaggccaaggcgggtggatcacctgaggtcaggagtttgagaccagcctgaccaacatgttgaaaccgtttctctactgaaaatacaaaaattagccaggaatggtggtacacagctgtagtcccagctacttgggaggctgaggcaggagaatcgcttgaacccgggaagtggaggttgcagtgagccgagatcttgccattgttctccagcctgggcgacaagagtgaaactccatctcaaaaaaaaaaaaaaaaaaaaaaraattatgtcatttcgttgtcacagcgtcagcagaataaatcttagatcaagatgggattactgcgccactcccttcttcccagtctgtggtttagcacgggaaaaagcaaactagggcccttgggccaaatctgatctgcagcctgtttttgtgccgcctgcaggagaacatttttaaattgctgaaaaaatatgaaaggaaaaatatttcaaggtgtgtgaaaactacatgaagtttaaacttgagtgtccttaagtaaagttttataggaacacagtgttgcttatcttttatgtaatgtttgtttgctttgagaccgagtctcactctgtcacccaggctagagtgcagtggtgcgttctctgctcactgcggcctgcatctcccacgttcaagcgattgtcctgcctcagcctcccaagtggcttggagtatagacacgtggcaccacgcctgggtaatttttgtagttttagtggagacaggatttcaccatgttggccaggctagtcttgaactcctgacctcaastgatagacccacctcagcctcccaaagtgctaggattacagacatgagccgacctttttatgtattgttgatacagtatgacaagggaagagttaactgattgcagcaggttagagcacagcatgaagagctgacaatattgaccgactggccctctcagacaaagtttgccaacacccaggtgagcagatayacttatctgtgagcagacgtgattcaggggagattgttgtccctcctttcctaagaaaatgtggaaagatgagaatgttgccaccagtgctgatatggagcgttttttttggaattgtcttaaacaagtcccaaccttgactttgcctgtgtaccctactctttactcccaggtctttgcaaggtaagctgtcaggtgttagctgaagatacggcagcccaccagtggtcccctgaatgccaacaagagtcacctctaagatgatccagctgttgcatggtgtagcatgcctagtccttgcagcacacacgctgccattcttcttcgccgttgttaccgtattaatttagggatgatgagaaagtggcctccctttccctgttaattccttggaggaacttctgttcgaaatgaatagtcttgaaatatgtcataaagttacctatcaggaccacttttacagagatttaaatgtgataataagaataaaagaaaatgaagtgacattgaggacgtcttcttttataacagctctaggtcttgcctgttaagcacgctgtaaaatgactgttacacgtttatggattgaaatggttctgctgaaattttaagtgttaacattgttcaaattttcattactaacacctctcacattgttagaaaacagtttyatgtttgacattttgatcatactaacctgggacattttatgctaaagttctcatttcatgccttaggaatcccctgcttattttgatttcagcacctttctgtaggacgccaatagcttatgtttgcacatcttaccccgatgcactctctaaaccgatcatcacagaagatattttgtagtgatgaagaaagcttaaatgtctcatttgtcagattggtttaggtagaaaataaggatttccaccccytcatcgtggttcccttttagattttcttgtttgcttttctttaaagctgctgttactcaaacgacagtccgtaaactgcactttattttttataacagctttattgagagataatttacatgctatacaattcatgcatttaaagtgtacaattcaatggctcagtctattcagagttgtgcaaccattgccacagtcagttttcttacctgaaggagaaagcctgcaccccatattttttacctcccattctccacttcaactcttccccagcctctgcgaaccgctagtctgctcttcatctccatgcgtttgtatattctggacatttctcattaatgggctcacacgatatgtggttctttgtgagtggtcctttcactttgcatgcatcatgttttcaagatactgcacctaatttttcagttccttgttttttcttacaaatacatttttcaaaatgagtaaacatatgtacaaaaatatttaatttatttaggcacgccaggtttatgagattcatctttgtagccaccaagagccactaacagtgctaacatagccaggcattctaaatgtgtttgtcaggtgcataaatctgtgactgataaaaccactgctcattacttggttcttaaactctccctcaatatagctgtagggacatgcaaaacaaaggctggctcattaataggatatgtctagagttctgctttagaaatcataatgtggacatcattgatttctctgatgctggaagctgctgctgcttcttcatctttatcttctcctccctgtgtattgagagcagggacctccttgtgctgttttgggctctccttgttcacccagattggctgcatcagcaccttcttaaaatattagtgttgctgagataggagcttttggtagatggataaactgggatttgtaaatattttgcttagtttttttcccagagttttgcagaagagaataaggtgttggtttgttataaggtggtcctttataaagtttagacctattttaataaggctgacttgggttgaagataactagagccatgacttycatcttgatggacaatgagtactcactctacttttttaktttatatttttattttagttcatttcatttaagacagcgtctgttacccaggctggagtgcagtgacatgatctcrgctcactgcaacctacaccttctgggttcaagtgattctgatgtctcagcctccccagtagctgggattacaggcatgtgccaccacaccggctaattttatgcatttttagtagagacgcgtttcaccatgttagccaggctggtcttgaactcctgaattcaaatgatctgcccacctcaacctcccaaaatgctgcgattacattttaaaactctaccttttaaaaattagaacctggacaaagaggtattaaagaatgtgtctcttattaatttattatggtaatgagaagagtttggatttggacctacctaggtttttctttcctccagctccgccaccccaactccttactcatgcttcctctgtaaaatgatcactccccagtttgacaggaattgcccctggaatcccatctggtgttctaattgttaccaaatycaggcaaatcttgcctgtgatacaggtggtgaagctactggatagaactggagcatctaactggtgtgagatggtatctcattgtggttttgatttgcatttctctgatggccagtgatgatgagcattgtttcatgtgtctgttggctgcataaatgtcttcttttgagaagtgtctgatcatatccttcgcccacttgggtsgatgaagctggaaaccatcattctcagcaaactgtygcaaggacaaaaaaccaaacaccgcatgttctcactcataggtgggaattgaacaatgagaacagttggacacaggaaggggaacatcacacaccggggcctgttgtggggtgcggggaggggagagggatagcattaggagatatacctaatgtaaatgacgagttaatgggtgcagcacaccaacacagcacatgtctacatatgtaacaaacctgcacgttgtgcacatgtaccctagaactgaaaatataataaaaaatacatattaaaaaaaaaagaactggagcatcgactttcgttttcatttcaagacccgtcccccatgaycacagaggatgaaaagtctgcttaaattataagctagctaattgcttcttcagttgaagacctaaatgagttttaaagtgaaatgcatatctctaagggctaagtagccaacacaataggcaattgagataggaaagactaatttagaaaaggttgttttgttcgtttttctttttccttccctcccttcctgatttcccatcttcttcctccctcttctctcccctctcccccttctcctttccgtccttcctccttcagttccctctttcctctttttcrcccttttatttaacattataaatacgatgggattgtgtctgcgcttttgttggtaattaaataaattatttatacatttaacacaatcttgaattaccaggtgatcatcttaggcactcaaaagcataagagcccttgaaagcaatatctaagcatagatattccatagcacgtcttacaatctaaatattgcttttagtgtaatcgaagcagcaagagtagtcacagcagttgatggactatttttcaaattgatttcaaaaatgtatttaaggggatgatcttctagtctagattacctattgatttttaatatgaaaagctcattatgtaagcagtaaccgcatataaaaacctagcaaacctttgcataaatcctttaattgaatttccagagcctgtggttctactttttttttaattaaatctatttctttttttaagtgttactgtgtaatttgcatgctgtgaagaggccctgtcccagataaagtgccattgatccttattaaacctcacctctgggcttgcttaaaactaactggaaaaattaaagtgttcatgccgcaatgcacttatagcttgtgtgataggattatggaaaaaataataaaactaatttccaggggagaatttctaatgtgagattttattttttttcaatttgataattaatagtgaaatcatatcatatatataaatcatattttagcctataaactgaaatggcaattaggaaagataatatatacttgatgtaaaaccatgttacgtgcggataatcttttagcactttaattttttaattgtagaaggagagaattatgaattcaagtcaaacacattaaatggtgggtttcatccaaaaaatctgattcttttactatgtactgtattagtggatttataatattagtgggaggaagtataaaagatatggaaaaagatattctggttatgttcgtgctaaaatgtgtgtattagaattaccaggggaaagaaaaatataaaagctgcaataggtttttctattttttaatacctaacatttgttattttaaaagcaataaaatcccctaaagaaatattcgtaatcaataagaacacaaaatatggaatatattaactgagttataaaaatgtttgtagtatagcacagaatgaaaaacacagcaagktatgtacggtttaaagtgtaatcaattttgaggttgtatacaaggatatacatgataaatacaagtagtagcatttttagtaaaggctgttacaaaatactgtatttatggcctattccattctttttatagctcattaatgtagaaaacaaacacagtgtatccatcttctcagacggtttaaaattcccttaaatgatgtttttaaatgtaaataactgagctcatttgatctggttcttccttaagccaatgttagcatgaatggccatatttaccaccccggggttccttttcagactccggaaagaaaaagcgatgataatgacgtatttccctcccttccacaaaacagggccaggtgtaacacactaagaacaaatggcttggcagcctactctcctctctcgaagctccatgcccaccttgctgttgcaccccccaccccaaggaaagccttcccacctttggaagctgcattaattcttccaggccacaagggggccgttgagttastggttcactgcactggctggcaggaaagagttttaatgcaggctccaaaggtgcttaatttcctgtggtccttatgaatatgcatacagtatgtgctcagcaatctagcagttcaaactagacagctggttctggtggtgagggttttttaaatttattttttatttatttattttttctctcccctttccttggacaagccctttctgaataagctgaatctgtagtataatttcattaactcatttccagtatttaatttggttttgatatttccatcatggccccttttctcctttgattttgtcattctgtagaagttgataatctgtattatgatcaacaaggcatattgccatgactgtaggaatcaccaatttagatatccaggcttcctaaaatataagtaagtcagatttagcattactgttttcctgaatgtaggagtatttggaaaaggaaaaaaaaataaacatacatcttggaaagcagagaaaggtgttttgttttctttctgtttggattaacatattctccatcactgtgtaacttcatccaatacgtattgaatacctactatgtgtctggcaccacttcagacagtaaggatatggatatgaatttgtatcagtcaagcyttccaggatcttattatctagagagaaagattaaaacatatgcaaataattttgatagaagcaaagacctaactcagcctgagaggaggttgggtttagagaatgctttcattgtaatgttttaaagctttttatttataactatagtttatttggactttatgatttaccaagtaactttagatgcaaatatggtagtactgtgaagattatggtttttgaatgaagtcactttgtggcatgatggtatagaataagatattttcatagtgaaaatggagataagacatgtcccattccctagaatagactgtcactgctctcgttgcctccaaggaggaaactgttataggaatgattgacatggaggttcatctgtagaatatggacagccctctacaaattgggaacaagggccaggacacgaaatatagtgacagcctctggcctgggagtctagacagtggtgaaaggcaggattcatggagttttccaagataagattcaagacccaaactatgaatgaaagccaggctgaggctggcaccaagtagaggcctccaataatgttgacccagcggggctgcattgttcactgccccctcctgggaaggaggaaccaatgacaatggagcatctaagagacaagagaaagggagtgtaaaggtgaggattccatggctttacactccagaaactcaggctagcttgttctcactgaagcagtcataccttctcgaaggcaactaggtggattacagaattgtgctgggtcctatggagtgtcagaaatagtgaagcttctggagcttcactgtccaatatggtagccacgtgtgactattaaaatrtaaattaattaaaattaaaagttcarttgctctgaaatagcagccacatttcaaatcttcwgtagccagatgtggttattggctaccwtattgggtagcaccgatatagaacatttctaccatagtagaatgctcttttggatasatctgctttaaagcattagtccccaaagtgtgaaggatgaaccamttgggttccgagagraaacattataacttctgtttatccattaaactctttcatttattattaaacatctcaacacatttattgggtggcaggtactgttttaagtgttttgcatatatttacatgtactgtcctttcaaatattctttgaaataggactattgttgtccatatttcacagatgaggaaagagatgtgctaagaaaagaggtggcagagtagggattccagctcagtagccactttcagggtcccrtacttttcaatgtaagcatattggctctcaatttaaaaatgttattttttacagatagtacacagatgcactgacacaggtaccctctccagtcytctgatggtcaggaattgtgtgcagtatgcagtacattccaaagtcaggctggccatttccccagggagagggtccatgttggaacctttgctccttgtggactttagctttgaaatgtattgtagttttgcatgtgtgcttagttggatggattgagacatcagattatgtggtctgaactaaagcaaccgtcacagaatgaacaagagacttacaaacatttgtgcaaaaagatcagtgtttggatatagttcttagaatagcaaatagtaagaaaagagcaggattggtacttcacctactcctaataaaagcccttcatcttgtgcaaagtaaacacaatcacagtttgatcagaagtggtcaatggaaaaacaaaaatctaaattagcaaagagaaatttgaaattgcatgcattatttttaaagatgaacattgctttaacctataccattcctggaggtagtagctaatagaatgatccaagtttataatttgtaaataagtagacatcttttgaggcgtatgcccttaatttttctaactgatgaaagcgtacttccatcaactcargacagttcaaagcagcttggagcctcttggattttaaaaagactctgtggcctctgtctctcttggttttcagtgctcagctgaggtctactctgtttatcctctgcctactagaaggatatcctttcaatagaggtgaaaatcctgaaataaaaggtttcataaatggggaaaaaagtcattgattgaaagagtcatggcatagatgctgaasttttgatgggaactttgcaggatgttcgtttgtttatcattagccctgggagagtcatccctcrcctcccaccaccccttaatttaaagggatttaaaatattttcaagtacatcctgatatcagcacgtggtacactgagcctagttgatggaattgtgaaaaaaaaaaagaatgttttcccaacaatttggctgtatttgccagaactgtttcaagaatgctatgacttttgctcagggcaagggaagtgtgtgtgtgtgtgtgtgtgtgtgtgtgtgtgtgtgtgtgtgtgcgcgcgcctgcatgtgtactgtggatgtgataagagctgtgtttgtgaaaactgtgaagacataacacatatctatgaaccttttctattaatcttcttggggctggagctttaaaataaaataaataacttttctgcagagasagaacctttccttacccaaagatttcgtaactttctcacatccttggttaaggctgagctgcctagctgtctgcatttctgataggttttgctttcatacacatttcaaggacttaagaaatctgtttctaaagaataacttagaatgtgcttgttatggtcccacctattctggggaataggtggatattatacatttatttaggtggaatggtgggtcagatggcttcatgtctttttacatcacagttccacagccctcattagtgaagcagaggttgaaggaggtcacttgctttttatcccaatgtcaaataactccataattttttttattattttttgagacagagtcttgctctkttggccaggctagagtgcagtggcgcgatcttggctcactgcaacctctgtcgattctccttcmtcggcctccgtagtagtcaggactacaggcatgcaccaccatagctggctaatttttgtatttttagttagacaccrggtttcaccatgttagccatgctggcctcgaactcctcacttcaggtgatctgactgccttggcctccgaaartgctgggatgacaggcgtgagctgccttgcctagccaaataactccattatttaagaaaaattaaccagtatttattgaatacttactgggccctgtgctaagtgctttscatgtgatttctaatttcctgaccattctatgaagtggctactataattatcctgatttcccaggcagagaaactgaggcttagagagttgaagtaatcaactgggtgttaaaaagctggtaagtggcacagcacttattggcgctaagactgtttctcaggaccttgttgtacgagagtcaacgataagacgcagaacgtatgtttcatttttcttgggaaggatctatctcactcatctgccttcctgtgtctagcaagagggccaggcacataaaatacacatggtacaatctgttaaaaggcatgaaaaagaaacagtcattcatatctgttcgtagaagtgggcgtcaagattttggggcactgagatctatgcatgttgtgggcccactttaagaaaaggagtcaaacatttagtgtggaatactggaaggggtccctagacatgaagggcctyttcaacctaccttttgttggcttcaaggttatgccatattttgcaaagtcaagttggagatggctctcgatatkcatgagtgtgttagactgcttttcttctattttttaaaaatgcacccaaatgtaaaagacacttttacstttttgatttgatgttgaaggtcatttgaaaaatactctgtctttattctttgaaatggatttactctcaagaaagttgcatgtcactttacttggaagagacgggtctcagkgaggtgtgcctccgctttcatgaaaagtctcccgtctgcagaagcattggctgacatggaagattttttttttttttaatacttttctttttgccggcatctgcgtagaatttttttttttttttttggtagtttcttaatggtctttagcaaaggaagtaagtgacrctgatcggtgaaggcagacagtaagatttataatgtatttgtgctagctgattgccaacagaaccggcctttcccagtggtgctgtacgcagactcggaaaatcaatagggattaacctttgacccccttcacatacttatactgtgggctgcatcgcttaccaatatttcatctgtttcacttagctgctgttacttactcaataatgtgtggccaatctcamaagatactaattcwttttttcaaatgcagcatcgcttgaagctgtgataaaatatcacacctttggaaatcaaggctcttctkgtttatttatttaactcacattaattagccttaatttwaaaaaaatgagaagagccagcatcatgatgcaagcattgactttgctcacaaaaacatcttgtggtcaacagtggggcttagggggcaggttttgtggctgtgacagaacacgtggcccctagtgtgtctgttgaaagatgggcccctttcaggaaaatkgcttaccttactttttagacataatttttgttttctgttaaagggtcagttatagataagtatgctcccttgcaatgaaatgaacccactttatcaaytttgaaggaatcaaaattaacttgaatacattgtctttttgcatatgtatgtagtgctttgtataaacatatgaatttgtaggagctgctcttaatgattattactgcataggctggaatagaagcaaaatttgcagtaatacttttgtacctttctctttaggccttggcatrtattaaagtactatacatttgtcttaaaaattgaaattgtagattattttcatctaagacccttttgttcacagatttttttttccaagtatacctattccccagagtttacttacagtttgctattgatccagcagctggtatttgaattggtcgatatactctgtaacttgtttaagataccctacctgagctattagtttaaataatgtattcataaattgattaatcattacagtaagacttattagctgcatttatatctgcgtgttatccacaattgacttatagtctaataatcacgtatacttaagcagaagttgggttttacgttacaatttaataattatcaaggtggcaaacggtagtatttgtgtgtagaagttgagtggatgtggggctttaaaggcaggagtctctaagcaggttgctaattttacttttcctagataaaataattctctctcccaaaatgaaatacaggaagtggaccaaattgtgtcagcctgaaagaagtgattgagtttgcggaagctgtcctgaagtcgaggttctggaagatgggtggggtggggggaagcgaatgtgaagtgccattgcatttgtctccatttctgtcccagttacatcaaggctgggaggaggtctttccactggttttccgggctgtttgtgtactacacagcctgtgtacctggcaagrcacgctctgctctgccctgmcttcygatgagctgactaacaccttatagatgargttcccttagaaccaaagatgccccatgaaactccctaggatgaatgttggaagtccttccaactgggattcccagccggaaaggaaacagttcatctgactacagggtttaggtttacatgtactttaaaaaaaaaaattaataaagtttatttttacagtaattttaagttcacagcaaaactgagtgggaagtgtagagtttcatatactccctgtcctcacacatgcacagcctcctcyagctatgcacattttcaatgaaactacatgttcattgaaaatgatcttttgggtggttgatgttcgattttggctctgtgttgggcctgcccagtgaggtccttttgactccctaaggraccctgttttgggtttcttttgaggttgaagatatttcagactctttccccctcaacttccataggaaccaaactctctttmttcctcccgtttggttggaaagttattttgcctcactgcgtgatttttctactgcaccaaytcccctttcaaacgttattccacaacatactaaattaatgtatactgtgttctttgggtaatggggaggggagcctgtctcacagcacgcatttgttcagctctgtgttgaaagagcactgcccgccgcgtgaaggacatctgctcacaagtgagcaattgtgcttctgatttggggcagcacctttgcttgaacgctggctccagatgaaagaacagattgccgcggagccgcttttccaaggatccctctccccagcatggggcttcatayattattgagagcaaacctactttccaccgccactcctggatgcacttattttgcgagccttattcagaatgtcagcatggatcacttggcracaaaggcctaaagggcaagccaggaagcttccatggatacgttatttatggtgtttaattattattgtacagatttattaaatgactctgttacctaggagtccatgtagttgctgaaaagagtttgctaactttgaatcgtagatgttttatctgaaaacaaaatttccttgtgaatgctgttaccatattcctggtgtctatgtgagggggtgtgtggtggtatgccggtaagtgttgaacaacctgctctgttggcgggarctaggggaaacaaaccctgttttgtagtatttgctgattactgtggtgtaaatactcacaccttggctgatttcaagttgcagcttggaacttggagttrgaaagagatgygtagtcccataccattttatgtatgtaaagtatttgcactatgccgactaatagacataaataacctcatgagcatagataatagtcacatctactaagattattcagaagtattgagctttgagtatgttttacctttttaatatagcttattgaatcatacatttatctactttaatacttaataatgagtgtgcccaacaactaggtcttaaagttcctgatagtttagcagtgtgctctcttaagccagtcggacctggttgttgtacactactgggtgtgtttaattgacttccagttttgttttgttttgttttgttttgttttgttttgaaacagtctcactctgtcgcccaggctggagtgtagtggtgtgatctctgctcactgcagcctctgcctcctgggtttaaggaattctctgccttagcctcccgcgtagctgggattacaggtgcatgccaccatgcccagctgatttttgtattttcagttgagataagsgtttactgtcttggccaggctggtcttgaactcctgacttcgtgatccactcgcctcggcctcccaaagtgctgggattacaggcatgagccaccgcccccgaccattgtctgtcaggtttaaattgcaccttgggttcgggtgaagttgatgatctattcctaatgcaggctcattcctaacagggcatccctgcacaattttccgctggggtgtgatgagctgcttcgcatcctgctaagtgtcctcgacagcgagcagacacatgtaccctgcttggtacatgccagatgattctgttgtagtgatattaaggacaacagtattttgccagaagctataacgagatgattctataacaacagcatggtgacatcagactatgttttgcaattttctttaatatttatgctggataaataatttatcttttttctcagttttttttcccttttctttttttttctccccatcttgaacatgttgctgtagacaggtgctaggtttccctgaatgactaaagcagagatttggttattttcytcccagaaaaagtagatgcatcagcagagttgagcccctgggcattatttccccaattccgtatcccatctactaatacaaactaatgagatctattaaggatgagtccacaagtttgaagggagtctcttaytaatgttccgtctttgcatggtgttacaacagcgggaccattttacactgagggtttgcgagaggcatggctcccctgttatgtatttgggacttactgcagatgcttcctctggttcagggtgttgaggcttcgtgctgttaatattggaaggtgggtcrtttgtactgggcatctgtcctgtatcttggagatgtttagtaacatccctgrcctctagccattagataccatctctcccagtagggataataaaaacatgtctccagatgttggcaaatgtctggccttctggggagtaaaatggcccctggttggaaactagtgttccagagctacattcttagctgcttactgcatcattgtttttagccctccttttctctggcttccaggaaccaccaatcccccaacactaggatagggcataaggcaaccttatgtcaccaaattaatgtccgcctaggcaagctggactgcagaaagaaaagcagtatttctaccctaggatcattatcccaccttccccaagcttcgaaagaggtacaggagtcctcagaaatggggcttctaaaataagtggaactgggacctcttctctctcaggctgttacttgttgtggttccagcctattttctgagctgtggagcagggagrgatctcacaggaaacttggtaatgtagattttggaggacttgaaaggttcctgctacctttggctggggatggagggaacatggaagatgggtctttgtttagaggaagctcttyatcctggtacsctrgaagttggcatagtcttagcagttagtccagatgtgaatttcaggattattctgtgartcttccaagtcctgtctcagcagtgaaataggctcagtgtagcttatgtctaggtggctgagttcattttctagtctaggtaaagggcacctcctgtaattgaattgtgtaaaacctgcacagtggtacacctgagcccttttttaggacccaagagtgctgagattggctcttcctgagattccctctttaaggataagactttctgatttttcaactggatttaccattgtggcatctgcacatgagcagactgactgctttttggccctacctggagcctgrgtcctcaggtagctgacccgagagaccgtggagctgcttgtgatatacaatgtcagtgctctgagctcattaggcgtcatctgagacagtggctgtaggggaggggaggtaggctctgagtcaagcagacctggaattttcttyatgggccattaggaactgtgtgacgctggggcatctgacttcacctttctgagtcttagtttccttacctgttgaataggtctaatgatatcattatggcagatcagtgggacgattgagtcaaataacatgcccaatgcctgtttctcagagtaggctttcagtgggccacatctgttgtcactattattttgttctttctgccatttgggatgtgctttctgataatggcactaggctgccttgttgcctcctgcatgtagaacacagaacttcgcagtctctgcagagtatctaaatcctgctctgggccagccctttcagaaacacttcaggagatcaatagttatctgcttacctttctagctgagatgagattttatgcttgttactagcagatcaatagtgaaagcaggttctgttaagttttttataggagtcattaatctccctcagcctcagtttccctatctgtgaagtgagtctaaccaggatgataatgaagagttaggtcaagtgagrttggcagccagacacccaccaccagctgtaacataagaacagatgttctctccagacccccaggtcagctgaggtcgctctgcttggaataatgaactgccacattgaggatttttttcctctctttacttggccaaatatccgagtgtggaagctctcactgtgaacctgctaacatacatttcagtgtctacaaaatgtcttttgagagaaaacagcagggacattygtgagctcttttttttttctaaccactttcccagtgagacttcagttttcattctccccttagcagctttcaaatatgtacgtaacacaaatgttacatgtttgagmatttaaactgaatttggacagggcttctatttccagaaccttctaactctatttctttgtgacctgatagtcttgctctccagggtaaaagaagaggatggaaatggctgtggggcgcctgaggtgggccctggcatgatggcaagttgccgttctgggttcactgggatggctcaaggggagtttggaaaccctcctaacatgtcatctgaaatctgggaccacagttccggctggaacacttgtcactaaagctgctgataagcaaagggtgtatcactggtatgggtaacwgttgtgggaggaggaggggtctgacagatagccggatgattttaatgtttatattccactggggtaagctctaacaaagacccatcatttcccagataaccaattcttttaaaagaacatctgttgaaactggcaatttacattcttcttaaaatacggagcgacataattaaccctctggggagactaatattagtttattagagacaatttctagttctgtttatttttaacactaaaygatttgttcagattggggaaaaaawttttttttttttttttggttgtggtggcgttggcttttacttggggttgacctttccttatcaaggacrtacaaggtgaatagctgggtgataatatatggtcccatgatcatcaaccaagcaccaacggaagccttttggaagtgcacagtattgtttaacacacaaataactcagcgtttagtaactttcaggtacaatcagtctattttaaagggacctcatgtgttattcatgtatgtgcacatgtgtttatgcagttacctttgtcttcattgatttggactcctttggtgctcgtaattggtgaaattctcttgtgatcattgttgtagttcccgcaaatctatttacggttttcacaaggaggtcacgaacatgcgttgttttcaatgctgggctagtttcagacttctggcttgttgtgggayggaggagaaagaagacagggcattttgatgtggcccagagaccaaatgaaacaaacgatcctctgattgctcagatgtcctctttgacttggaaagcacccacgtgaatgttgaaccatttggccctcagttctccgtcctgcagcaaactgcattgactcctgttttctacacagtggtcttcagctacaccttaccaagcaccccttacccagcaaacgtggcttctcttccccaggcagagcagtycgttacttagactaggaaatggctccgagaagctcacccatcaccatttgctctactgcaaaacaggactcattagcaggagctcataaaatgaaactggcagtgagctcatatggaagargcatcacgggcaactcggcttggctcaccagcccctgagctgcccccgagtgaccgctccagccttctttccttccacctctccctcttggccaacttcatgcttcagccaaagtgaactgagctcaccaggctgagtcatctgtgccagctgtgccctctccccgaggctgcctgccatgctcgtgctttcttgtctattggcaaaaggctctccatccttcaaaatccagctcttggcctcatatcttccacaaagccttcccagacctttactcacctgggccattaatcaccttccctctcagtyagctsctacaccatgagtgcttttgtatsgtgactgtctggttacaaggtcatcttttcccctggatgagacgccccttggggaaaggaccaagttttattycctgtttaaccttggcctgacaacctaataggtgctcagtgaacagttcttgaatttaattctctccctttccccacactgatgkgtatttaagctccagtggtactcgatgtgttgttttctttgttcttttttttgagacagggttttgctgtcacccaggctggagtgcagtggcagagtctctgtgcactgcagcctccgcctyccaggttcaagtgatcctcctacctcagcctcctgagtagctgggactacagttgtgcgctaccacacctggctaccgtgtcttgttttcaatgcagtatataagagggtgcattgtgtacctgtgggagtgattacagaatcccatcaaaatgggaatcactgactgaaaactggagtttatttgtaagctgggagatgggagctgaatttgaaaccccaggagaaaatagcatataaagtcattttaaataactatcatttgcagaggaggggggcacagatgcctccagtggcccaagactcccctttacacattgccgttcccttgccttctactcctcttttcattacccttatcaagattctgcagcccagggtgctgcttgttgatggacatcttcacctgactttctccctggtccaggtgcattttaagcatggaaggtgacacttgccattctcaatggacaaagggagtggggagtgtgggggtgtgctttggrgttagtctctgggttttcgaaacttagcattctcagattcccagccaactggtttcacatgacaagtaaatgagcaacctggaagatgagtggcgtttccacacacagggaagcagatagttccattasgtgacagtgtgtgcacagtttatggaggatgaagcggaaaacctgagccacaakgcagtakaggttggacgagacactcattccgaaggsgggtgtgtatgtgcaaactgtataatttttttcttcttttctatctgctagcaaagtggrtaagttgacccatgacatsgtccactggagggaccacatttgtgactctagcaattaagcytcccttctcatctgtggataaaactgacctcccagtgtgctggagtcaaacatattcagcatccaatccacattggactgtttgcatgtaacgtacagaacactcattcatctacatctaggaccataacagcgagcaggagacagtccctgaccctggggactaagcccaggacctgccactaggagatattcatggaatcactgtttctcctccttttcaaagaagactgaatttatgatgaaactttcttcgtatattggctttgagaaattctgttttggtgcttatgtgctctggataattctcaatgactttcaaagttatgattcagggagtaattggttctgagagaatatgcataatcacatcaaggtgtgtttgttttccaccatttgtagccttttgacaaatttctgggggcctcatgcctgctaggccgaatacttgtgtcccttgagcctggagacggcaagtacccagtgtgcatgcatgcactcccaaagtcctttattcacgacagacatcactaatcaatcagtcatgcttagcatactactccaagtagtcattactaatcatctctagtcagcatgggagatactctttaccatcccggtaaagtgacgttttgatgaaaacagcatggatcttcctgcagagaacagactagccccctgtacagcacacaactcggggaattttaggtytggtgatttactgctgttggagcctggccttcttcctgggagaaggctsgaaaaacttcawgtcagttacttaatggaataatacatgtttcctgcttccattgtcttcctggacctgacactcactctttaaccataagcagaagacacatacamaaatgtcctatgttaagaatctttatttaagacaggtggctagcattatttgggtccagaagcttccctggaaagaaaggattcactgcaagatcgacaggcttacccagttcatttaggcgtggctcgattaatgcacacaaagctttgggaacatatcagtcacatcaagctaggtccacctgtgtgagtaagtaacgtgtttatttatgattttctttaacagcacagaagagcaattgcatttggtcattctagtatcaactgagttctttataaaatatctttggggtgtttaaggagaattattctttttacaagttctgattaatgacaccgcaaaaatgagaataatgagctaatatgtatctagtaattgctatgcacttatatgtatagaagcgtataatccacagcactccttctgaatacgttacgtaaatggaaccctcgcaacagtcttatccccattgtagagatgagaaaactgaggcatacagaagggatggaactaggccaagagcatagaggtggaattgttgtgtgagcctgtagagtccgtgttcttacccactgcatgatgtctgatcatcgtcaattttctttccatttggacagatgaatggtaacacttccctactaggtagagcaatgattccagaagtttataataattggaaagtgtattagtcgattctcacactgctataaagacattcctgagactgggcaatttataaagaaggaaggtttagttggctcgtggttctgcagactgtataggcttctgcctctcgggaggcctcaggaaacttacagttatggcagaaggtgaaggggaagcaggtaatgtcttcacatggctggcastggaggaagagagaaagtagggaggtgstagatgcttttaaacaaacagatctcaggagaactctttcacaagacagcactagggggatggtgattagaaagcacctcatgatcccgtctasttcctgcagagaacagaytagccccctatgcagcacacacctttgtgaggtccctyctccaacacagggattacaattcaacctgagacgtgggtggggacacagagccaaaccacactggaaggtaaaaaagttggcaaccagaggcttagaggaggttcaaatctcaaagtgatgtctttccttttgcattttggatggtttaataaataagattgatacaaacacaaagcattaagcaaacaaaaggaaataaaaacggcaacaaataaaacttctgtgctttttgaaattytgtttttggcaggcaacattccaaagatctttttcatttaaagtccaggagtcttctgtgtgaaccccacacaggtaccttggaaagactgcatctcctggattttgcatggttctggcttaatggacaacatatcagtcattttttgaggaaaataaatttaaggcttggtyatcggtccttgagtcagcacattgagcgttttgtcaattagctcctcccccmatctktatggtatggcttttcctgtaattacagtcaagatcctatagccggaggaaggcctgtcaattgagtaagaggctgatgttcatcgcacagtgacagcccattcggagggttttaggcctgtccttagagaggcttgttatttcctctttcggtactttgttgcaacctagttcaccgccatcagatgaatggaggtttcttatgctgtggcgaaacccagggggtcaagcccctcggacatgacgtactgcaaagtgaggatgtttcattgatttgtatttttaaaattaaaaataattatttaagctgcatctgtgtgcttataagaaaagatatagaaagattagtagtagactgttgtgttctttttttttttttttttttttttgagatagactcttgcctgtcgcccaggctgcagtgcggtggcatgatctcggctcactgcaacttttgcctcctagattcaagcgattgtcctgcctcagccttctgagtagctgggattacaggcgcccgccaccacacccagctaatttttgtatttttagtatatacggggtttcaccatgttggccaggctggtctcgaactcttgacctcaggtgatctgccctccttggcctcccaaagtgctgggattataggcgtgagccactgcacctggccagtagtagacttttgatagggtttttttttctcaaggtgtaggtttggctaggaagtcatagaaaatgctctttttttttttttggagatggagtctcactttgtcacctaggctggagtgcagtggtgtgatctcagctcactgcaacctccatctcctgggttcaagtgactctcttgcctcaacctcccgagtagctgggactacaggccaacgccacggcacctggctaatttttgtatttttagtagagccggggtttcaccatgttggccagggtggtcttgaactcctgacctcaaatgattccctgcctccacctcccaaagtgctgggattataggtgtgggccactgtgcccggccaggaagatggtcatgttttactttgaagcaatctgtgcttggtttatttttttcagtgagtgtggattacgtttataattttcagttactagttaggtaaagaatcaaaattaataaacacatttatagttctcagagattccttgagagaggaacatctttaaatggataaccacagtcttctaaacacctgaaagggtgtcttttgctgaaytatggagttttagttttgctttagaatttttggatgattagacttgtacttcttttaggctatttttccacctggtactatttggctttactgamtgccctcattccccatacaccaccttgttttgttcagattcccctaartcttcattctcgtcccacctccccatcactcctgactacttgaaacacgacttctgtcctcagaaggcagcagtgttccctcctcccgttcatttttcattttcccgttgcttaaaaaaatcaagcatatgtttgcagtcatcactgatgttctgcctcctcttctaaagttatagatgagtgccaagttggcagagcatgtagaaagatcactgcagatgtccttgtcgtgttgaccttattggagaatttcctatctgtgatgacctgtaaatggaatttaagggaggaatcamacgtgttagcacggggttggcattgcgtggctgttttcaattaacttgaccactatsataacatcaaaggtgtgtgtaccattctatgaccattgaatctccatggacatgttttgggaaatggatttgtcccattacactgctttctttagtgcataagatcttgaagggagggatgcattctatgcaccccaagtttctggtttactcgtggtttcaggwgtccctttagacaacatcactgacaactcactatgtaaaaccaaacaaattattagctttcttactgtgtgtttgcatttgctgtgcccagggaaatgggaagtgcattgaggaagaggccccaagacawggagaagtcactccaactttccggraacmccttttgctgtgccatgtgcatggaaggagaggaatgaatgactgttgaagccagatggccttgctcattgattctctcctttcccgccctctcaagccatccagaaggagaatgaaatgctcaaatcaagggagttaactatggcmaagatgttagtaatgggaaactttggaggaaggcaaagtcagaaattattctgcagggagatttggggatgttggatgctaaggcccaagccgtctattgtatgccttttgctttggcataaaacaacagatgaccttctgttaggtgtatstctgctcatgcttgagagtggtggtgtttggaaagactcaatagcatatgcacatgaggaagttgaccaaatgattccacagcrcatactcattttttgctctgattctagcttttcctccaattttattcagaatttgttcttttcttacctcacaccatatagaaaaatcaactcaaagtggattggagacttaaacataagatctgacagtgtaaaattagtagaagaaaacaaggaggaaagctccatgacactggtctgcacaatgagtgtttttgtatatgaaccgaaaaacaggtagcaaaarcaaaaatagacaactgggattacaacaatctaaaaaayttctktacagaaaggaagcaatgaacagagtgaagcagcatcctacagaaagagagagaatatttgcaaaccacacatgtgataagggattaatattcaaaatgtacacacagcgtaaatgcaagaaaagaatctgatgtaaaaatggcccttccaacatctagcattattgtgtgttgaataaatacttgttcgattaggtctaatcactcttcatgattggatttccaaaatgtggactctcagcagkacattacagggacagtggttgggtctggagatgtcacccttagctgtttttcacaatgagaggttgttttatcataaataaatcaataaatggcagattatacaccggagttactgagaaatataaaaaaaaaaaaagcccacattttaaagggaatttggtatttttaacaaagcatcagggggccgggagcagtagctcacgcctgtaatgccagcactttgggaggccgaggygggcggatcacaagatcgggagatcgagaccatyctggctaacatggtgaaatgctgtctctactaaaaatacaaaaagaaattagctgtgcgtggtggcgggcgcctgtagtcccagctactcgggaggctgaggcaggagaatggcatgaacacgggaggtggagcttgcagtgagccgagattgtgccactgcactccagcctgggcaacagagcaagactccatctcaaaaaaaaaaaaaaaaagaaaagaaaaaaaagcatcagggttgtcaccatgaagcaggaggagaaaaataatgctgttagacttcttaaagcgtattttgtggtttattttattgctctgtaaattgcaggctgtaattcatggggctcaggccagtgatttcacagttgatagaccaggcacatctcttcccaccccttccccacctaggggcaaggttttcaggaagagccccttttctaaaccacacatggcctgctcacaaatcttatgataaaactctacccactgagaagcacaaggtgtgaggctattgatgaggagttgaaggtgacagagactgagaaagggctgcacacctttggcctaaagggtaatgagcaacacacaaggattgggagatgttcatggcaagaaaaattcasaagggacattgttgtttcactaattctgtaaaggagagcagcggcatttacttakgccgattccccattctctctttctgtttttaaacagagacagatcttgctctgttgcccaggctggagtgcagtggcatgatggcatgatcatagttcactataatctcgaactcctggtttcaagtartcttcctgccttggsctcccaaaatgctaggaatacaggcaggagccactgttactggtctgtttttttccttaaatacataggcaacttcctcgattgtctctcctttattggcattgagagataagcacaataatgattgttaagatggaatattatgaaggctcaaggaatacttctgaaggctttttgtctatgaagtacacgaggtttcttaatagtttggcctctggcaaaaatggttttattgtagtttcatccttgttgagtcaataattaactgagtttgattaaagctgaattttcctaagtatgaaaaccatgtgggyccttctctttcctcgtgatgcacggtgatagtgcgtatctaacacttgaaggtgtccacgctggccctagctcagtgagatggctttgctttgsgggggtgagggggcggaggtggtggaaaggcagcaagctacgatgttcttatgtgtgtggccttgcttctggtggtggggtggcacacatgctctgtagtctttctggatgggtttggcccacgggagaccccctggctgtccaccagcccctttgtgatagtctcatagtcttatttgtcttttggcttgtatcccacctgttcactttttaccatagctaacctttctmagtggtcaggtgggactcatggagattttccgttctttggmractagcagcgactgcagattactcatcagctgtctccttgagtccacaatgccgggcggtggaygggcttcctgcctcctggcccagggcccctttgccggctcttagtgtagagcactagttgtaccatctggtagttgtttgtgcctgcgactctcttccctattaggctttgactccttaaggataagaaccatgtcttattttttttaatctgtagctccagtatccagcccaggacttgacaccagcctctgtcaaatacatccgtggaacgcatttgtaagaaatcgaggccaaggcactggaagtcccattgtctctggatgctgagaccttgaatttcatgccatggacccctcccttacattccgtctttaatgtgctataaatagacattcctggccttgcctaaataggattaagtagtaccaaatggtccttaccgttctgaggcctcactgagactcattttgaatctttaaagaaagcagtagagggatggagaagaagtgggtcaaaacctggtttctgcctgtgggaaaatacaaaacaacacaacagcaaagcagactagcatggttcaaagcacacattgaggtttttggtgtgccattctaatgcatgagctcattttgagccaaggatagctttttggtgtagaattttgccagtcctacggtcaatgcagtactaattgtgtgtgtgactttgtgcagtggggaaaggtggggctttaaaataaaacagaaggtatgaattgcttggcatttgctgtggttcctaagtctccattccgcttgccaagattaaattgaattattcccgctgccattcagttttactctgcacaaaatacagccaacatttttgcatttctttctyccttcctccttttcttctttctttcyttccttccttcctttytcccttcatctatctttgttccgcttttgtttgtttttttttagatcgctgcatgctgccgcgttgggttaaccatggtagcattttaccatgagaagccatagcaagatgtgccaggtgcatgctgctggaacacctggctgaggctccaacagcattttcctatgactgagggtagggtaggtagatgactcattacaatttataaaatggggggcttagcttgggtatcatcgtggttattccaagcagtcttccagctggactagcttttcgggaacacgtgtgtgtttgtgctggaagccccagtaatatcatttaattcgaaagcttttttctatgatgaattattcaggcagtgtttaccaaaattgtcattgatcagtacagacccagagagcatgtacaacagcgcctgtgctgggcctgctaggagtcgatattttctggctcaaagaagttccaaaagaattcaaagccagtgtgtctctttctctggamggccaagtgatgcaggtaccacgcttaggtctgctggtgtttagcttgacttaaaacccagccagggaaatatgtttcactttgctggggtgcaggtggaggaggctattattcttaggcatttaacagtgaagaatgttgggcagggcagagggtcagctgaatggcagggattccaggtctcagttaatgcccacaaatttctgaactttgaacataaataccctcactgcaatacatgtttttctttctctctctttctttctttctctttttttttytttttttttttttgaaaaacttttttggagcagcacctgcatgttgtaaaaacacaaaataaaaaaaaaataaataaaagcagaccccttggttcagatatctttgtttgtgtaaatgttttggcattctttrtgaaaatcttcagattttcaagagcttaagatgacctcctctagccggctgcagcagtgtctaggtatctgtgaatgtgtaagaaattgagacagcctgcaaaatagctcacccagcttttctttaaagttccaacctttttgctgsctctctttcaaactgtactgctcactttgggctgtacgttagaaccacctgagaagttctttttctttcttttttttttttgagrtggagtcttcctctgtcacccaggctggagtgcagtggtgggatcttggctcactgcaacctctgtctcctggcttcaygccattctcctgcctcagccttccgagtaactaggattacaggcatccgccaccatgcttgggtaatttttgtacttttattagagacagagtttcaccatgttggccaggctggtctcgaactcctgacctgaagtgatccacccacgtcagcctcccaaactgctggaatctgagaagttacgtgaaactagcgatgccctgggctaatgaaatcaggctccatggtggggaaggatgttgcggtggggttggggtggcaatgaaaggtgaaaaccactgtggtcccacctgcccatcgtcagatttcggttcctctcagagtyaacgtagaaggtttctgggggcatggacctgagtcttatcccctttgcaaaagtaagaattgtatcgtagcctgactcagggttttagccaacttctctggatgctaatgctattctcttctttatacttgtcttccytcccaggcacacatccactggagctttgcagggcctatctgcccttagccctccaatatccttttcattttctttaatagttttattgatatataatgtgcctaccatataattcatctgcttaaggtgtacaattcaatggcttttagtgtattcagagtttgcatccaccatcacaatcagttttagaacattttcattaacccaagaaaatgaccccttagtcatcaccccaaatacctcctctctccagttcctggcaaccactaaccaatctacttgctgtttctatggatttacctattctgcgtacctcatataaatagagtgatatgttagtcgtctcttgtgtctggtttcttcctcttagcatcatgttttgaaagtttatccctgcgacagcatctaccagttcatcatttctttttgtggctaagtaatacgccattgtatggatataccacattttgtgtatccattcattagttcatggattttgtgtctattatgaataatgctgccatgagcatctgtgttgtccacaagtttcagcatggacttctgttttcattccaatatcgtttgatgacatgtcttggcagtgatgtctatgacactgggcaagtgtcttaaaatgttgtgcatcagaaaaaagtcatcattgccaaggccagcagatctcgaaaagggggctgggacacgttggtgatttttttcatgctctacttacagtatgactcgtaactgttaatggctgagctcctccttaggtgaagaaggaaggcaatggcgttttctattctgggcctccctgcttccagcgatagcaaggagcgaaatgagatgctgtctaagaaaggaaggtgctgcgatctttgattactacacagcytcggcagtgtttgtatgattaatgagtccatgtttcagacgttcccatttaatgtatttgagccttctaacaacattgcctttcatatgttgctgactgtttttgagatttatgaggcctaactcgcaagcgatgtgtgtctggattaagagaacctgagaatctctatttatgtctgaccccaggaaattccctttaagctgcttgtcagaggtgcatgctgagagcatgatgggaagatggagtcttccatccactggtaaaatctggaatctgctctcatttcattttcactgaactgaaaataaggtaacagaccctcaggtctacctataagtaccttccaactgttccacttttgtaaatttagttcarataatacatatgctgaaattcctatatcccccccatactccagatcttcaktgtggaatttaaatataattccttattgtaaaaaaaaaaaawttttttttgatcaaggtgattttgataaactaaatgcatctttaattttactcacagcaaagcgattctttattttctctctaaaagcataattgatgtgccatgatctttgtctttgcatttttaaaactgaaagaacatttccacaccattagaaataagatttcttcttaaaaatattcacaaggtgcaaacacttacatgtgtatatgcatgatttcaccaccagggggcattgtggtttgactgtccagttaaagagcctgtgttctatcagtttacccagaaactagaaggcctgcgagtatttctgattccttccaagaaggattcatatctggaagagaacagatgtcgactctttttcctctctagcaaacagtagtgttgtcaaatttgctaaacttagccagttgaagattaacatgcaatatataatatgcatgcgactaagtgtacaataaatagtaaatcacatttttatgctttctctgaacttggaagctgcaagttatgttttttttattccctgggtgtgatgaaataaataacattcaaatacatcttaaagatgtcagtcagggggaaaaaagtgcttggcaactgtgtttgatagatttcttttatgattaattctcctattaagttttaatgacttcaaagatacaaagctagaaactacaaaactaggcatggttaataaataactgaaataccaggtgtatagaaatgcatctgtggaaaaatgaaatcatrtattctctaggatatattaggaaatggctctttggcaagtctagagggtaaagtatccctgaagggggaaaaggtttaaaaacagtaaactaaagaagattgtttttctgaaagaaattcccaggagaaaggtactttctgagattcacatatgtagattacattgttatgaaccaacatttataagcaagcttgatctctcagaatgcgtttgtctatctcagattttcaagaatcctcrtacaaattgtccagggtttccacctcgcagttttcttccagggttgctatggcatggaaagtacattgctattttgttatgtaaatgctcaacagactggctcattccagaagtgggcgtcgtgatgccagtgtcttcgtaatactatctttctttcccctttagcacccagaacttatgaaatatgactcggtttatcctgaacacatstctgtgcatcagggaggatgggagaattaattccagtttctcaattgcaaaagtgaggctggtcatggggcttggaaccacgccacggacgcatgaagcctccccgtttacatgccaaatccagagcttakgcatccrtgctcagggctctctgtggtaggcaacagctggattatttactttctagaatatctcgagttcttaatctgagcagtttcgaaaccaarcccacattaattaatataaataatgactgggaaacgttgcaggactccccggaaaagaatgtataarttgatgtgtttttgtatatgcttatgtatatgcctttgtgcacgaaaggagataaatggtgtatttcacacagttccttctcctcctctaagggatattattgttcctgaatttttctgagccgccgaagcacaatagggtttagagcgttcacaccaggcagcccccactcttcagaacttcaaatctaaagatcttttaaatacacagaacttacttttgaaagctgtggcccatcccaaatgaattctaatcctcagcctctagaatgcctggagtgagaaaacagaatattgttcttttctgtttatattatttcatactgagttaayacacttgccaagactccgaggcagcttctggcttgacaatgccttctttaactagcctagtttctagaataaagttcgggtccaccaggccctctgagtggggctcaggacactctgagatggaagagactggagaaagccaatctgtttctccctgaaaatcatcttacttttttaacgcttcgtacctagatttggcctgggcagcccagggagactgttcragcactggatacctagactctgctgggctctagagaagtgctgggctacagcgcccagtgccctacctcttggggccagccagcctcaccaaaaaatcasgcttctggcttgctccaaactcaggaagttgctgggaagtctggctagcaacaccctcattcccagtcctggccatgcctctctgctctccctagcacagggagcatgcaggcttaaggctggaagaaaccccaagcatttggccaggaagaggcaactagttccagctggcccacatactacactttaaaaattacccagatgatstgattctgtagagagagagtgggtggagaggactccagggccatggaggaagattcggcctttctctccctaatcatgagcaatgtgatttggagagagaaggacccggttggctctgcaaaccgcatttccttggctgaacgccagaggagagaaatgatccggcaagaagacacaccattccccgtcagcccctwcccgwcccttgcacccctggatcttctgctgagtatcggattggtctgcgtccaagagctcctcgcttggccagcaggggctgcctggagaaggggaggacaggcttcgagttttttgggtagkgacttctgtggacgtgaaaagactgcaccagaaatcggaggcagccctccaaacataacttggcctcttcgttctccctgtggacacacaggctgtgttctcctggccaagagtccaagcgtgtttttggcgcgtgctgacactctatatcgcttttgcttcggaaacgaatctggtcagtgacttagccactctataaaaatgaagagcagagctcgagtgcttataacacgtcatttttacccaagacagagaagaaaaacgaaagagagcctgagcattcctttgactccctccacccccggaaggtatattcagagtctccaagactgcctccgcctactcacatgtttatggcccggtgagaccgcatcctccctttctctatctgtcccttttctggatgcagggacacagaatcccctaagtgggaagagctttggagtggaggctgttcaaagttctgtggtgattaattattacctacccaaggtctggtcattgctatacttgagttcttttcaggctcaagatctctacctttttgtgttttttttttttttgtacagagtcttgctctgtygtccaggctgtagtgcagtggaacaatctctgtatgctccctgcaacctctggctccaggtttaagtgattctcctgcctcagcctcccaagtagctggaactacaggcacctaccaccacgcctggctaattttttgtatttttagtagagacgggatttcaccatgttggccatattggtcttgaactcctgacctcaagtgatcctcccrcctcagctgcccagggtgctgggatcacaggcgtgagccaccgtgcrcgacctcagggtcccttctaacctgtgctgttgtcataaaccctggaggagaagcaagatctttctagcaggagcaacatcatcccaaataaagtgatagactttgatagtgttcttctattcattcaaccaacagagaacaaatgaaaagaatcaggagtctattgaggagacagaacatgagtgatttctgtgtgctgactatatttaaagacaagattagcagtaatatataaacgtaaataagaatttttttccccagccaagaaccatagattggacttcacattcaaaatgtaaattgtgcctaggaaacatcaatgcttattttaagcaactgacccttgggataaaaataaaaagtcaaaaggaaacaaacaatgttgctgagaagtgatagaatattctagtttatatctcagtcatwttacagctctggcatttctgggkaacactttagaatacttccactccggttggtccataaaaagctgcctgtgtttttatgttttgaaaatacacgcagagagacccactgcatgtcctattaggcatcttatccttgagtaagcaggcatgcaacatcagtgtcacacacatatcacccccatactcgacattctttgagaaatgccttggtcccgtctccagccagatcagcattgcacctcttggcatgcgttcttacctgttgaggatttgcttgaattataatatggtagaggaggaaacacagtcttactgtgccgtgtgctgagcgcagagccattctcagcatcctgccttgattaataaggcgtgaaagatcctccgaattcgcacctgttcagacaagcttgtccaacccatggcccccgggtcgcatgtggcccaggacagctttgaatgtggccccatacgtatttgtaaactttcttagaacatcaggatttttatgcacggaccttttatgcatggactgtggtgttttttgatttttggttgcgtgtgtgtgtgtgtgtgtgtgtgtgtgacggagtcttgctctgtcactcaggctggagtgtagtggcatgatcttagctcactgcatcctctgcctcccaggttcaagcaattctccgtgtctcaatctccctagtagttgagattagaggtgcccaccaccaagctttgctaatttttgtatttttttagtagagacagggtttcgccatgttggccgggctggtcttgaactcctgatctcaggtgatcctcctgcctcagccacccaaagtgctgggattataggcgtgagccactgcgcccggcctttttttttttttttttaacgctcatcagctattgttagtgttagtgtagtttatgcgtggccgaagacaattcttcctccactgtggcccagggaagctaaaagattggacacctgtaaacaaaaacaacacagccatctagctgcaagacgtagctaattgctctgcagaacagggttggccagcctggccttgatgtcggagtgttctctaracctcacacccagtccctattcttaggttttatttctcaaaccaggttttgcctgagaaattacagcaaatgattcakagcacaatgatgttgctcatttttgataagtagttgaaagctgatggtgccctccatttcaaagcaacagaagaaacgctggtggtcatggagaaagagttgggaagcagagcgtgaatgccgggatctgcagatctgagcactatgcctgcagccgatgtctctccacagggctgatctggtggctggggtgcccctggtcagaaggggtgattactgtttcctctctctccttggtctctgtcaaacctaccaactcttttcaggaatgcagatatttaattatcttctgctgttacatctgcatcatgtattggctggctgttcaaaagtatcctctctaggcaaataacgagatttcgccagcaggatctcccgttaaaggcgtgcatgtgtggctttgtagacacgtatgtgtgtgtgmgtgcacacctgcctgcccttgcacagtgggcactgtttccagtgtgcagtgaggccctcccttcgtgtagaacaggacaggacaatgacaaagttattcaattaataattgaagcttgccgggcatggtggttcacgcctgtaatcccagccctttgggaggccaaggcaggcagatcacctgaggtcagaaattcaagaccagcctggccaacatggcaaaaccctgtctctactaaaaaatacaaaagttagccgagcgtgatggccagcacctgtagtcctagctacttaggtagctgaggcaggaactcgcttgaacccgggaggcggaggctgcagtgagctgagtttgcaccactgcattccagcattggtgacagagcgagactcagtctcaaaaaaaaaaaataatataataataataataatcgcacctcaatactccgtagccattttaccgcatgtgactattagctgtgcttttgcggttatctacgtctgttgtgtctatacggtggagtatttgcagacgctctgccagtgtgcaatgcttcccagccctgcattcagggataccaacttgggtgctgaaaagcagcgatggcaggactatttacaccacggaaacaggcaaaaactactgatcaagccttcactgttttgtttatattgtcttgacttagaaagtgattgcaatgttaataatgcagattaaattgaagcgtacagtgcctataaaccattacattatgaatagtataaaaaattgaggaagccgtgtggctcacaaattcagcactttgggaggccgaggcaggaggatcacttgagcctgggagttggaaaccagcccaggcaacatagtgagacctcatctctttaaaaaaaaaaaaaaaagaaagaaaaattagctggcatggtggcacatgcctgtagtcccagcttctggggatgctgcagcgagccatgattgtgccactgctctctggcctgggcaacaaagagagatyctgtctccaagtctgtctgtctgtctgtctgtctgtctgtctctctcggaaatattccttcagtgtattagtaaagaagttacttakgagtcacttatgcccttgaagagtgagtgatgtatcaaaatatgtctgtctttattgtttcactttcatccttctttttttggagatggagtcttgctctgttgaccatgctagaggtggcgcgatctccactcaccgcaagctccgcctcctgagttcaactgattctcctgcctccgcttcccaagtacctgggattatagacacccaccaccatgyacagctaatttttgtatttttagtagagatggagtttcacccttttgattggttggccagtatggtctcaaactcctgacctcaagtgatccacctgcctcacctcccaaagtgctgggattacagtcgtgagccaccgtgccggccactttcatctttctgattaactgaaaagtatcaagcaatgcttacatgtaactgcactttctcatcaactgcaaccataatttagctatggatacaagagttgggcacaaatccatgaaagcattgagtgagaatcaattggctctgtgggatttacaataaagaatgttgtttatttttatttgtaaattgtgtgctacagatccttcgtatcagtaaaatgtatgataaacatatgtgtgtatattcacacacaccctttcattttggcaggagtgtttgttaaacatttaccacagcagtggattcacttccatcagctgctaactttcaaggatgtttgaggatgcatgacctgtgcaatgcacctgcttcggtgcctggcacagagtcgcaaagccacaaagatggtgcttgttggttgtatgtgttgtttccatctgataycaccattgaggggagcaagatgacatgtgcctaccccacgtgtccagcagcaaagccacctggcatagtgggctgctcagcgtgcctggttcatactgcgtatttatagtcccagggtgttttcagagagtaaaagtcctttatgattagcaaattgcaggtcctcccctttctgatatttacagcccttgcaaccgcctgtacaaaaatcgggaaaaggcagaagmsggctgtcattaatgtaaaagcagctggttacctccccctccccagcgcacacatcacctcctagtacaattagtcaccatgtcttttcccttccgtcaagccttttagcggagttcacagggatgccttcggtccagacactatgaccgttgacgaaggatttgaaatattttgagaactctgaaataatgcacaccagaaacgtccagctgaaaacaaaaagggaacaagatgacattttgcaatcccatgcacgttgcaggcrcgttgaatgtgaaggtcagtagtacttcagagggcaggcctgttgcccccaagcctgttgcctaagaaatgcccaggccctttgaacaaaatggattcgagtgattacagcacgtcctcacttacatctcccaatatatttcttgttattctcgttgagtactgcattcagacagaggttgccaataaagtttattgtaggagctaagtgtcaatatctgtagtaccccccgcctagggtgctgctaataaaatgccacagatagtctgggagaggcatgaaaatttgatggcaaattgatttcaggttcatcttgaaatttgtcctcagctggactcgatacttctggcagacatgggatggcttttgtcagaagggtctgctggaatgagacagagatgtcttgatctgaatattaaatacaacatgctgtttatgacattatccgtttactgctaaaatacccagctacttctgtttacacattcttctgcgttgaatgggtaagatagcatctcatagatccactttacatatgaaaagaagttgtatcaaacttgctgggcatcagaaataaagggttttagagacactggcttcaaacacaagttattccatccaagattctaaacttarcaatgcaacttgcacttaattttaaaacgctggaaaaataatgataaagattgtgtgatcaagtatagcagccctgtggtgtttcctcagaatggtgtattacagaaaaggaaaaagccatatacatggagaaraaactcccgatatttaatattatcaattgctggttcctgtaaatttgcatttatggatcacattataaaagcaattactcttatggattgttcatgcagaaatgcaytatgatgatamtatacttttaaaagtatatttatttccagaattcaatttgtaagaggtttgagggaaaaataatactgagttttgagtgtttctgattttaaaaatgtgttcagtagaattaaacgtgttcaccaaaacccattttatcmctttaaattattgggcaattaattgtatttacttagcattgaatgcatgattagaaatggaatttttaaaaaagcaatactcaagtggagtgagttcatttgttcattcagcaaataggacttgagtcccctactatgtgcggagccttaaaggatgagaaagatttctgggtgggacttcaatgagactcatttcgcaggttttcatgttattatgtatatgtggtaaataattaattttttcacaagtacttgcactagtgatgctaaaataagcttgactggcttgtaaatcaatgaaggttactgttgcattgctttgaaattgaatttaaaaacagaaacagagcagtccctttgcttccgaatgcagccctcccattggaatcactttggaagaatctggatctgcgtgttacccagtcttactttkcaggcagtcccaggcaggaaggcccattagtgaaaagagccctgcatatgctgtgggtcatcacagctgctgctttgcacatttaggagatatttgtggacctttcattaggacaatttttatggcccgagattaaaagttaaagttaagtagtaaacgtaatgaacatgtgcctttggagattccaactggtttgtattttcattctctccgttggtcatggcccattgaattttgatgatagcattaaaacaaatgcctcaaatcatttttggaaggagacaggatatgaattgacaaattaataaaataaattatacttcaaagatgctaaattatctcttctatgtaagtaggaggctctcttttcagatgtggaatttgtaggagcttgaatattctcaagagagggtatgggcaacatttgataaaagatgtaattattgggtcgtaggaaataatgattgagatagggtatccactgccctggtgggggaatcagtgaggctaggaatcactggaaaatgacattccttgagactccttcaatgggtagagtttgctttagcttttcawgtatcttactgtatgatggttgcttttgggttgaattccaccttgggttcaattcaacatgaaagttaaccttttggtgaaggaatgatccasgggaaatagtaaaatattagcctgtcctccaatacaaattgcctgtgagtcccactgatacttacaaatatacagaggtggtgtaaaaggattctgtgtcaaaactattaatatttgagaaatacaatacttatcagagcctttgtatgtaaatgtctcatatacccctctaagaasgggagcgaatagtattttccaaacttacgtcaccacttaccatccacctgcatactttacacrtcttggaatcaaccttacagggaacacttggtcgaaaaacagtgttttctaaatttatattacagttcccactccccccscccccacttgtatcactttgtatgacagtcttcttgggaacatccattgggaaactcttcccttgcaggtgtctgttacaagtcctggttcacacagtgttgcgaaagaatagttgtatgtcacaattttctttatatagtatttattgagaaacctattctgttaatagaatgactcaaaatcagccaaccccataaatactgctcaagcatttagaaagactttctctatagaggcttcagacgtcagaaaaaaacttagagagtgactttcagatacagcaacctagtctatgttatagaacattctaaaaagagcagattttaatatctttcctcccacacttgctttgactccctcctttagtaattagataattatgtataataagcacattaattatgtgcaacagctgccrttgagtgtgtgcatgtacaactgcttgaaaacagcttgtgagttcactattaggtccatgaaatttttctccttggcaggttttcactattartttgcttgacaaaggatagatacattttccatgtgtggaggtaaaagcagtgcagtgagctaaaaagttarcaaaggtgaagtggtcctaatctgcggccctggtacacttagataggcatcattgcctttcctctgagctcttggtgctgataacagcttccttgaccgataagtgtaccagatttccttacctgtcccagggcaagatagcaagagtttcttgatgcatttaaaaaatgcatttagtgttggcaaaaggctkgcaatttattattaagtggaataagcagtttaaaaacagtatgtacagggtggttttctggctatataaacacacaggcatwgaaaatagatatacataaataatgttactataatttgtctgcctcccttctctcagaaaagaccaatgaattatctattatgtgccactcactatttgagtgctgggaatacagccccataaagtgaagtttcatatatcaggtagcaagatggccatggtctgtgttttgagaatcacaggcgtttttgaggctcatggctataatcccagcacttggggaggccgaggcaggtggatcacctgaagtcaggacatcaagaccagcctggccagtgtggcaaaaccccacctctactaaaaatacaaaaaaaaattagctgaacctggtggttcaygcctgtaattgcagctactcaggaggctgaggcaggagaatcacttgaacccgggaggcggaggttacagtgaaccgagatcgtgtcactgcactccagmctaggcgacagagcgagaccctgtctcagaaacagaaaataaaacaaacaaaaaaatastattccatagctgactattttctgaaatgattttgttacttttctaatgagaaaaaaatagatctcgtgtgtggagggaattgaagatgtaatttcagactctgcgtacagctaagctcatcgtagttacttaactaacacttaaggaattaaatggcatatctgtgtttgagaggcacactgagatgagacaccagctctttttatttatttctaatggtttgcttggtgtactggtcatttccccggaagtgtgcaagaagaggtaggtgacttgcatgttgtctatgaacgtttttagaaacgtctggtggaaccatccgggcatcacatagctatctctgtgcagagccaggccggatgcctaggtgagatggaaagcttccgtcagctttcttgccggcctctcctcgcagccgctcccttccacacctgccttttcacctgccagactgcgcgttgcccgttgccctaggtctgcgtgttcagcacttctgcaacagtttcttctgcaaaggtaacttagcggagggtacagggtcttcttccaataagtcagcaccttcagttaaaaaaagcaataacattctccaatcttggcagtctggcaaggtagaaagacacctgaaggtgaacatctttggcccatgtgaaattttgttacgtgttgttaggtttcatttgtctctcagtcaatcagtcaatcartcagtctctctccttccatccccccttgtcccccttttctcttctctccccttccctgctccctctactttaaggttttctcacagattaagagagtagcatgtgctcatcccaattattgaaaccgtgcaaatgaatagcaagaaaaatagttcttggcgtgcccctttctttccgcagtgcccaggccagaagtacctgctgcccaagaccacagctgacagcgccccgggagtccttcacactcttctctgagctcttccatccttaaacagacatctatgccaaatgcagggagggtttgctgttggcttttacaagaacactgtcctgttatgcctgctgctctttgcttggttttccctggacggtcacaaacatacctccaggtcaacagttaaagagagaacccacttcttctaatagttgtgtaatattccatactacagatattctgttatttatggtagctagatttctattcatttttaattcccatgctcagagctttccagacatttggaaacattttagaaaattgacatcatctcttcaaatatctgaactcagatttcctctgtgatgttggaatctttaaaatatcatgcatacttggcctgtttctacaattttgttccccagccatcgttctccattttgcacgtgtattgtctcctcctattcctctgtacccttcacacgtgcctgcagggtatatacttttgcacaggcaaaagtccagctgaaatgatccttacttagcataatttaaacgcgagggtttcctaatgctccttccatttaaataattcaaaaatccgtggcaaggtacctgaaaactactaagagaagagaggtgttaatggacacatcattgaggctgaagccaaactgtgtgattctgtctgcagttgagaactgtaagaaaaagatcaagattaacattattattattggtgttacctcatgtctgtacctttttggacacktgggtctgtttcccgagaaatcatttttcctcctccttgaaaatagtgaatttcaagtggttttaattttaactgcattatttgtttgctttatatagtttttaaagttttatgaaaaagtcttccatgtgttttttatttatgaaatcggggcagccatccttcaaatatgaagcaggtatctgagaatactaaaatcttacagtgcattttataggagtgtgaatgatttttctgcaattgacatatcaaggagcttatcatctattattaagttaccttttcctgaaacaaaatatttgtcagatgtaacttggtacccaaatgccttttcttgctaaactaggaactgtcacacacacccacccacccacccctttattcttggttctctcctatattttgacatttgaagcatccacagaaaagtaatagaatgagcaattgaaaatcaccagaactgaaattatttccagctatgtttaaatatgaatgtcttgttcgacgcttcgcatatgtatttatggctgtgtgatatcattatggcatcctaatgaatgtctactgaattatgtgggattcaacaggggatacaaatggatttgaattctgtaactgtcatattgtggtccggagagggtggaaactgaagtatccctctgcgtcgccacatctgtcaaaagtcctcagcgctccccgcaatccatgtctggtggaagcgcgaggtggtgaggatggaaagggcatgcgttgacttcatgttgggacgggtcttaaactaaacacatgtcacgttatggagctgtttaccttggctttgaggtttatttccttctggattaagagtgatgtcgttttatataacaagaagtgaaaaaaaaaaagaatgatgttacacaacctattttttttttttttttttttttttactctgaatgtgtaactttaaatgaagaaccaggacacctcatcctttagtcttttctttactagtgagtggcagatatgtgtggaccacagagatggactgaaaagagaagtaacagtccttggtttgtattccagcccccaccttcctatgtctttgrgcttggtaattagatgcttggagcttcagtttccccatctgttggatcagaacggcagtatgtgctctccagtattttcataagagtcacatgaaatatgtacctacagagtctatcactgtgctttttaagttggggcttaatatgtggtagttgttgctgtttttgttrttattattattaatgttattttttgtttgtttgttttttgagatggagtcttgctctgtcacccaggctgaagtgcagtggcgtgatctcaactcacckcagcctccgcctcctgggatcaagtgattctcctgcctcagcctcccgagtagctgggactataggcacctggctaatttttgtattttatattagagatgggatttcaccatgttggccaggttggtcgtgaactcctgacctcaagtgatctgtccgcctcggcctcccaaattgctgggattacagacgtgagtgaccacgcctggcccataaatgttatctttatataacatactcacagctcccttaggagtacttttgtccatttctacacaatggaaacttayaattttagccttagcaacatgtatttactgggcatctagatttcatttatttaagaactttttattgaatgccgattgttcagcagccaccatgcaaggtcctggggaaccagtgggcagccacacagagaaggtcccaatggcaccagaacaaggccagcttcctaggaggtgtctggcttcaagacagggatttcctttagctgggtggtagagaaatggattgcctgtgatttcactgtgcataaaatgacctttcagcccttaacctgcgacatccacatgtgttctttggtactcacgggtgttatggttcatagctgtggtcttctgaagtataggaaaaggcagcttacagaaaaaaacttgcttgtttactgtcttctgagctgatttctcacctactggcaagtggataggtctastttttgtttagctgtttttctaatttaatcttrtacatgagacagctatagatggatgtatagtctttgaagtggggccagttggctccgtctattagctgtgtggcttttgtgcaggtgacttgtggcccccggcctcagggatctcatctctaaaacgaggctcttgatgttacctgccttacccagctgtgaagattaaaagggttttgtgtgttaaaggacttgcggagtgcctagaacccaatgagggccacagagcttgctccgattgctttcctgaaggcagtaagcatgttgctctggtaatagtcatcttcacggccatcattttgatcacattttggcttagtttcttcctctaccctcttcccacgtcagacctttccatggaaggtaaaacatgttaacagtctaatgtgtttccttctaatttttttcttcatttatattatacatctatgaaatatatatatatatattacatatggatatatagacatacacagatgcatatttagggtgtgctatggttagaaagtttgcatccccccaaaattcacaggttaaaatcctaatcctcaaggtcgtgacggtactacaaagcaggacctttaggacatgataaggtcctgggggcggagggtactaatccccatgaatgggtttagtgcctttataaaacagacccaagagagaccgttatccattttaccatgtgaggagcccacaagcaggtgccatctatgagccagagtggacccttacccaacaccacatctactggcccctttatcttgaacttccagcccccagaactgtgagaaataaatttgttactcataagccacctaagttatactattttgggatcgcagcgtgaatggactaaaggtttttgagattcttttttcagtagtttcacctaataaaacatggaatcattctacgcatgctgttctgtattgtagtatggttttccacactgagaacatactgtgaccatgcagtcatttcccagatggaacttattgagggacattcacttagtttcgaaaggtttctccctccactcccatcccggccacagatagtgatgcaataacatccttgttcgcatgtccagtctgaagcttttattcctatgggatgagttcccaggcataggattgccaggctggactctaaattttgaaaatggatttttatcattctgatggattacggtgaagagagccaaagtcttgatagaaacactcaacgcagtgaattttttagatgtaaaagtggatggtacttaaggatacgcacattagaaggagtaatttgaccagcccatcacagtattaattgattttcatgtctcgaagacttctgatttcgttttcgaggctggaaaggcaggtggaaagcccatcagttttacacacatattttgcagacaagtattagaaagtaactagcctgcttttactaatggttctgtggaagaaacacagcttgaataaatgtcgtcttggatgctcagcacagattggcagtggatgtcaggattgtctggtgggaaggctgctgggactcactctagactgggagtggggtggggtggggcagggcaggacggccctggctgattaataatgtttgttatgaagtctagggtacgtggggagagcttcatgaatccctgcattggccacccctgtaccacggccaatgattcaccctccctaaatcccagggccagatattagaacatctgtgatgaggactgattttctgttcgtggcctctggaagtccagtttttctgagctcaggggagccttggttgtatcttataggcaagagacgaatttacattttgccatggtgttaacaagcaaaagaagacaaaagagctcaaaatagacagtggcgtgctggggtcaggggtgctggtcaccagggcgagcagttatgggtgaagggctgaatttgcagggtcaaggagattgcctccaggccccttctggaaacacactccctgagccttgtagaattgagttgattctgtttaactgcccagtgaagaaatgacttccttgctttaaaacatttgacagctgtcttatataacttaattcttcattccagtggcttttggagcagcctcaaaagtcattttatcttcttggctctttgatattatttgtagtaatttatttaaagtaattagagacgggatcttgctgtgttgcccaggctggtctctaactcctggcctcaagtgatcctcccacctcagcctcccaaagtgctggaaataaggtatgagccaccaagcctagccttgatattattttttaatgggggtgtgtgggtgggtggtgatggggatattccagcagaatatcagaaacagagatgaggaaggcagagagagctcaaagacaaggctcaagttcatattccaacgccagtacctgccacctgtgtgaagctgggctaattatgtgtttaggtttcctccttcgttaaatagagttctacttatattacagggttgtcatgcaagttgatgaattaaatacgctaatatatataaattctgagtaagtattaaccaaagaaatggaacatcaatattggttcccagtctagttcacaggtgttatcaagatggttacctttctaagtgtctttttatttcactagttccaaaagagtatctctcaaaatattaggtagtatttagtcaacactttaacacataacttgtttttttttttggcataagaagcccatgtgaaaacacagttgaccctaagcctatgaaaaatgacttgtgtgtgggactggggtggctcataggagaaggaggatattcgtctggatttttactggtatgtatatatttttgggtactggagatggggacagtgagtatttgaagctcacagcaggcccattttgcaagttttcaggaaactgaaattcagagagattaagtattttgccatgaatcactttgtagtaagtgggagagctgttgcaaacccacgtctgtctacatccacagcctgtgctcttttcatatacaagggaatatggaggagaagggaagtgatggaaggctttaaaaaaaaaaaaaaaaaacttcagaagctgatttgagatttattcatctttggtgtactttctttactaaggcaggttgtagactcatgaaacctagaaggagttgaaaaataagggttaggattaaaaaaaaaaactagtgaaatcaagacaccattttgcttaattgaaggcttgcggaacattaaagcacaacaaaaacctaattctttgagtgtttctgaggccaagccttttcccacaaggcactgtgtacacggttctggaagctctcctctgtttgcacagtagtcactcatcctgctctcgggctctgcctgcagtctcttcctctgtctccgatgtcactcttctctgtcttcttcagaagctgtcatatgacctccagatttctctttgactccctgtattaccattagaagacatctacactgggaaattgctcagttcctgtttttgattaatattttatcagccgcaagaggaaatggtattctatagcaacactaataagtaattgagcagatgagatgctcttgctagctttggtaaaaagtcggggcaaggttacaacagaggagctctgatgagacttgggatgrtaaagtcaagtcgaatatctggtagggttaaaaatctaacagtgggccaggcgcagtggctcacgcctgtaatcacggcactttgggaggccaaggcaggtggatcactcgaggtcaggagtttgagaccagcctggccaacatggtaaaatcccgtctccactaaaaatacaaaaattagccaggcatggtggcatgtgcctgtaatcccagctacctgggaggctgaggcaggagaattgtttgaagctgggaggcggaggttgcagtgagctgagatcgtgccactgccctccagtctgggtgacagagtgaaacccatcccccaaaaaaataaataaataaaaattaaaaaayctaacactggtacgagaagaaattatgctctaaatccttctttgagcagtggcttacagacctaaatttatcaaaggtggtggcagtaatagtaataattaccatcttcatttaaaggcacgtatctaaaccaaaggacctaaataaaatattaatttttcatagtgtttaatatgtgccagtatatataaattcaaggtaaggtagacagctgtaaactggatsccctgctgtacccagcaaatgctgagagccctgcttcccctcttgtattcaaatggctctataagagaggaagtagtacagctatcagtaacaatgccatccggtaattaccgaatcataaatgtttggggagctgaaggtcacgggcttagtagcaattctagtctgatgtttgattccttgtgaattttaaatgcttgtactctctatctgggtgatggtgttttagttgccagtggacagtctgatggaggtgggggaagagttattcttccatatttatttttctccaccttgggtgaaaaaacttcgcttttcgtaatgtggtacagtgtgtgcttctgtaaatggaaatggtttcagcacatcacagtcatgcttccctgttgaaagatgctccgttttcccgcatacatgatgtccagcacaacgtctgatttatgagagcatgaccctgggggcctctggaacagctgctcacacactccctttaggaggcccaggctctcaggggaggcccatagtgcagctaggagctagagttttaggatgaagaaattacaggtaagaacacagccccattttaagaaataccagtgatttctgtttttccttgttcttctttccctcagtattttattaacatgtgctactatacaaatacacaattcacttaggactctgtttcgtgtggatcacatgggagctttcattaaattgtggtgattccaatgtgagtggttatcaagtcaacatcaaataacatgaagtgtgttttagtcggcaaacatcactttgtaattctctgatgtgtttgggttgattcccttctttctgctctttttctctttataaagtaaacatttttattgcaaaggtactgctattgttagtttctaaaggcacttgtcatggtgtgactaatattagaagcagacacagccatgatgagcaatactctttttttgtttatttttgwtgttactgctgtaagccactttcttctccctctccrttaaaatgcaacttaattggtaaagtttagttgactagagatttcatttatttatttatttatttatttatttatttatttgtttrtttgtttgtttgagatgagtcttgctcttttgcccaagctggagtgcagtggcatgatctcggctcactgcagcctctgcctcccgtgtccaagtgattcttctacctcagcctcccgagtagctgggattacagttgtgcaccaccaggctctgctaatttttatatttttagtaaagacggggtttcaccatgttggccaaactggtctcaaactcctgacctcgtgatccacccgcctcagcctcccaaagtacttggattaaaggtgtgagccaccgcgcccagcctgtatttatctttttaagtaacaaagtattagcattgtgataaataatatttaatatatagtaagggaggtcaaagtatgaactattttgattttttatgggtttttttttttttttttaaagaatgcgttgattttgtttttctttcttttttttttttttttttgaggcaggccttaggtctggcacccaggctggagtgcagtgacgtgatcaaggctcactgcagcttccamctcctgggctcaagcaatcttcgtgtttcagcctcctgagtagctggaattacgggctcatgccaccacacttggctacttgtttaattttttgcagacatagggcctcactatgttgcccaaactggcctcaaattcctagcttcaagcggtcctcctgccttggtctctccaagtgctgggattataggcatgagccactatgcccagccaaattttgtttttcttttcttttttttttttttttttgaaatggagtcttgccctgtcccccaggctggtgtgcagtggcatgatctcggctcactgcaagctctgcctcctaggctyatgccattctcctccctcagcctcctgagtagctgggactgcaggcgccagccaccacgccyggctaattttttatatttttagtmgagacggggtttcaccatgctaaccaggatggtctcgatctcctgacctcgtgatccaccagccttggcctcccaaagtgctgggattacaggcattagccaccacacccggcccarattttcttataaagtcaaatgggagatacttgtttgcargaaatagttcttttggttcttacttttccataaggattgagtctcaaaatgtctggtagcatccactgcattttgtaggggacaataacaaagaagatgccagcaatatcttctatcttttccaacattattcacctctcccacccaaggacaatggtgggctggacagagcattcaatgaccgagaatctaccataagctactagggccacatcttcccctttcttctcccccaggtttgtcccatttgtactgactctgacccaggttgtcatgacttgagactcactagaagtttcagaaaratgcasactgctttaaaaaaaaaaaaaaagggcaaggggaggtgtgagaagaaagtataattctttttcttctaackggagatataaaaatcatataagcatgatttatsatttgattggaacattgtattttatggttgcagagcacaygtatcatcctatctgcttctgacacccagtaagcagctctggcttttataattttgatgaaagargtttcccaacagtatttcggtgtgcatgctcacacaccagccctggtcrtcagtgaacagattcttccaggtcttcattgtrgcggaagaaagtgagatcagagatcccgaggaagggcttcagtttcaccagtagtggagctagggagtagsggggcagaagccgcaggaagtcagtgcaggacgccggaggccactcctaattgcttcatgtgttgttgccgtgctgatgaccttggaggcgctgctggtcctggatccttgcgaccttttcttccaagaggaaatgtggtgctgagccccccttccactggctgtgacaaagaaggacccctcatgtgggggcctaattctagtgaatccccaaaggtacatgttgaaatagggaaaaggcccaggtgaggctgtctatgtaatagagaagatccattgcaaaatgaaaatatggggttctagccaggggcagggaacttaatctcccttttccatgggcccaacacctgaatctagggcaaacagstgtcccccagattggatcctctgctctaggacacattcttgtcctagagcrggttgggcaagaggcttttctctcagtcaccagccccaaaccctgtggtcttgccagcccaggacgtgtcaagactgcagcctttgctgacytgtgaccatctccaagtccatgcccaggcccctactaggagttgagggcaacaggggcagtgggtctctcctgcttaggaaatttgggttgagggtggcagtgatcttgaggggggtctgggagggaggagccagcctggcctggtctggcctggcccagtgtgccagckagggcaggtgcaatggctcaygcctataatcccagcactttgggaggccgaggcaggtggatcacctgaggtcaggagttcaagaccagcctgaccaacatggtgaaaccccatctctactaacaatacaaaattagctgggtgtggtgatgcacacctgtaatccctgctacacaggaagctgaggcaggagaatcrcttgaacccaggaggtgaggttgtggtgagccgagatcatgccattgcactccarcctgggcaaaaagagcggggtaaaaaaacaacaaaaaaatgatgtaggaatgaacagatgaacaaccccacacaacctaaggacractttgaatcaattcttctaagctggtagcagaagccacctttccatttgacttstatctcgctctttttttctttcttttttttttttttggagacagagtctcactctgttgcctagactagagtgcagtggtatgatctcagctcactgccacctctgcctcctgtaatcaagagattttcctgccttgggcccctgagtagctgggactataggcatccaccatcacacctggctaatttttgtattttttgtagaggtggagtttcgccatgttggccaggctggtcttgaattcctgacttcaagtgatgagactgcctcagccasccaaagtgctgggattacaggcatgagccatcgcgcccagccagacttgtatctcttaatgagtttaactacatttaaccatgtatgtgtcagtcctactatgcaccttacagctcactaaccctgtttaataatgtatgttgytacatttaatctttatggtagcctcatgaacaggytcttatttagttcagtggttcttgatcaggagtgatattgcctgccagggaatgcatgtcaatgtctggagacatctggggttgtcagttcaggagggtagaggataggggggaaaaggtgctactggcatctagtgggcaaaggccagggatagtgctaaggatcctgcagtgcaaaggascatgcccaccacaaaatatcagcagtgccgaggttgggaagctctgtgccattgtgcaaagattcaaggtggctatgtcacaggactggtacatgtccttttttttttttttttttttttgagacggagtcttgctctgtcgcccaggctggagtgcagtggcgtaatctcggctcactgcaagttctgcctcctgggttcgtgccattctcctgccttagcctcccgagtagctgggactacaggtgcctgccaccacacctggctaattttttttttttttttttttttgcatttttagtcgagacagggtttcaccgtgttagccaggatggtctcggtctgctgatctcgtaatccgcccacctcggcctcacaaagtgctgggattacagacatgagccaccacacccgccctacatgggtattctaacccagtctagtgatagtccaacctcctgtactatgagtaattagcaaagaattaacagcagaagatcgctctcaccaaagcccatccagaaagtggctcgtattcaaggtgctaattagggtgttttgttgccagtaaaaacatgagtcagatttcatgattgattcatgatgactttaaaattaatgctgctgttatcatacaaagtagtggtaagtggaggtaagagaatgtttttgctttggggtactaagtcatcgttataataaacacacagtaaacccatttatctcaggcttaatgctttcttgtttcttctaagcacttcttaggtgcctctgggctttttaacattctttggcagttgtaatttattaattgatttttaaatttggccggtgaaaatgaactttargtaggggtttgaggaaaatgaaaaggcctattkgtttttcagtggctggttcttcgtgttcagcattaaggattggtagaaatcaggcaacctctatgtaacctcagccatcttggattcccagcttactcacatcatagatggagagtcagttgtttagaaaaaaactttcttttttttttctttccttttkcttttcttttctttctttctttcttttttttttttagggagggtctggctgtattgcccaggccggagtacagtggcacgatcttggcttactatagccttgacctctctggctcmagtgatcctcccacctcagcctcctgagtcactgggactacaggtgcacactaccatgcccagctaagtttgttcattttttgtagatacagggtctgactgtattgcccaggctggtcttgaactcctggcctcaaaggatcctcccacctcagcctcccaaaatgccgagattatgggtatgagctactgtacccgaccaagaactttctattatatagattttaattaaaaacagtcctgttgagtggcctctttatcaaatgcattctcacataacctcatagaagtgagccctcttactgaattatgtggctggggttcttgggtatgttttgttctattttctggttggtggttttctttctgtcgggtcccgtgggctctttytggacctcttctcagaatgtttttcgttttttttattttttgagatggagtcttgcactgtgtcctgggctggaatgcaatggcaagatccctgctcactgcaacctccgcctctcgagttcaagcgattcttctgcctcagcctcctgagtagctgggattacaggtgcatgccatcacacctggcaattttttttttatttttagtagagatggggtttcaccgtgttaggcaggatggtctcgatctcctgacctcgtgatccacccacctcggcctcccaaagtgctgggattataggtgtgagccaccatgcccagccctcagagtgttttaaaatgcatactattaaatacctaggattataaagggagccagctatacttacatatagttctctctgtgaccctgtagaatgcactgaagcaaaaataacaggtaatgctaatcataaagttttacaaatctcctgaagagtcttgttggtttcygtgttgatgaagcaggaaatttccctgacccctttgcaggcaggaagtggagtgcggatgctggaactagctggctgctttggtgccagtagaggtgaactgcactcwcttgaaccccctgcactccaccccttctgggaggaagcatgcaggtgagcaggtgcaggagccagggtaaatgcttttgggcactggcaggaatgaactctgtactggccctgggatagcatctggcaggggatgcccgtgacccctgaaaccctaaaaggagtgttacagtcagtgctcttttagttttgccatccacggacggcttaagtgttaacagttsagtggagggtcagcgtgacagccttttgcacccacatctgggttcttgtccagtgtccaggaggaaygaggtctcatgagcaaattttaaggatggcaratgtgggggattttattgctgatgaaagtggctttcactgggaagataagctaaaaagaagacaaagcaggaaggtaattttcccctggagctatgccatcaagctgttcttctgaagtccagccgcttctctccaactgtggtctctaatttccagctgcttctcctcttttcttcaatgtgccagcggagcctggggtttttatgggtacaggattgggggcaggccgggccatgggtggttgtggaaaaggcaatatttgagtggaaaaacagggatatatgttctcactttgggccacagttccaggcttgaggatggggccctcaccacggacctgccctcttctgcccagaatttccctgcctcctgtccctatcattgatacctgcaattctttgtacatatgaaatttaatatggtgagattggcatctagctgctgctagagatagtgctcatartaatttttaacattgattgagtgtrgataataatccaggagctgtgctaaacgttttacaacacattatctcacttaatttcacaactccataaagtagttttcacttagttgagggatgaaaaaagttaggctctgagaattgatattactctgcaaatatggaattggaatttcaaagcaatctatggtctttatcacttctccattaactgtccttgttttattaatgctgattactttttgatttggtttggttctttggagttgtttgcatttcrtgagtcttggcatctttttggtagagaaccttgctaggttctcacaatgtagaaattaarcagaaaacagaggtctcaatttgccttttcagcgtgaatgcagactcttacattcagtgctgggagtctttcttgagggacagtgagagcgaggaagggtttccattctccgagatggatggttgcattagtatttatttcctttttgtttttccttaggatgagaaagaaggcagtggagcccttttccttaggttagaatggttctgttggttgaattgtgcaccctgtttggttgaaacaattggacagtaaggatgtgactattattgttgctctctaatactttattatgtcataccaaaaattatcttttgtattttgctaccagttcttttagtttctcttacatgtatgaagttggatagttagaatgagatgaaaataaatgggctgggcgtggtggctcatgactgtaatcccagcactttgggaggctgaggcaggtgaatcacttgaggtcaggagttcgagactagcctggccaacatggtgaaaccctgtctctactaaaaatacaaaattttttttgtattttgggattcggtttaggtgatgtgtgtctgtaatcccagctacttgggagrctgagacaggagaatcacttgaactccagaggcagaggttgtagtgagccaaacttgcacaactgaactccagcctgggcgacagaggaagactctgtctcaaaataaacaaacaaataaataaataaaaattgtttaaacctgccaactacaatawctttttcagtctctttctccctttcccaccttcccaaaagggtgggaaatttttaaagtaaagtaataaacaaataagttttgggttgggcrggagattagttagagacaggatctgtaggtcagaagtggtatttgggggagtagggagttttktttttttttctttttcccttatgcatttgggagtggaagagctgtcagattctgaatttagttagatttataatgctagagacattcagcagtctgcctttycctttctgttataaaatcatgtttttattgaattacattttaatattggtatcactttaaaatgaaaatgagtacttgcaaamtgtatttttgaaggagttkggtggtggtggggggatgccattttggcaacagatgacttcggttcaagtcctctctctgtctcttacttgctttgtggctttagaccagccacccactcagagccttgaaatcctcatctttgaaatgaccatagtaagttcctgcctaggctctcccctgaagctgaaatgcatgaacatgctttgtaattttttttaaggattgatactagctagggtgttgataagaaacagcaggcatagttactgggtgattgagaagagtttaacaaaagactrtattagtctgttttcatgctwctgataaagrcayacccaatactaggtcatttacaaaagaaaaaggtttattggacttacagttccttgtggctggggaggcgacacagtgatggcagaaggtgaaaggcacatctcacatggcagcaggcaagaaagaacttgtgtagggaaactctcccttatgataccrtcagattycttgagacttatttgctattgtgagaacaccttgggaaagacctgcytccatgattcarttacctcccacctggtccctcctgcaacatgtgggaattcaagaagagatttgggtgggtacacagccaaaccatatcaaaaaccatttayaaaactctaagcagccttaaaggaaaccaccaagggaccaaggcctgatgaagcaagagtaggagggaacagatgcttggatagggcaggtgagtcacaggctgatgggagctgccaccgtcagtagaggtcctgatgacctgggagggtgggagccagacagatgggagtatcctagcctcagttcctttccatcctcagaactcctcccagtgcctctcaatggctaaaccaaccaaaggttggagctcaaggaagctcctgaggctatctttacaggtcagccagttgggaacagagttgacggagaggggacaggaggtgactagatttggaaggaaaattagaaaacttttggccgggcatggtggctcatgcctgtaatcccagcactttygggtcagttgagtctaacataggggtgtccaaacttttggcttccctgggccacattggaagaaaaagaattgtctttggctgcacataatatacaattgttgatgagctaaaaaaaaaaaaatycccraaaaatctcataatgttttaagaaagtttatgaatttgtgttgggccasattcaaagttgtcctgggccgcatgtggcccaccagcyatggtttggacaagcytagtctacaggttcttcaagaggggcttgagcatttgaaagacttctagtgggagagatcacaaggkacaastagaaaatcctgggctggcctgagaggcagacctgtgattattttgctctttgaaagttgtccttctgcacccattttccccagacctaacctcgatttgtgctccaggtctgagcagaaatgttattccctccaraaagccttcccykgatgttgagggatgaagttgtagscccctcccgaatgcrtcctcagaactcgctggttctcgtcctcgccctcagcatacttgctcattgtttgtttccatctctatcatctctgtgagccctttgaggatggatgtgtgtccatsttgttaacagttggmtccccagtaaccagtacagtgccagatacagagtagtaaccctacattstagcgtaggcaaatattctagtatttgccaaaactagaggatgaatgagtgatgggtaagagagttctcagaaaaatggatataaacaatattgtaaatcatatttggaarataaataytagaatcattgaatccctgagttatagaaaaatttattaatagcgctatctggctactttttaaagtgtggacatcctcgatgtattagctatgcatctgtggataggaggcttacccactctgagtcttgtcaaataccaaacacaggaaaacaatatcttcctgagaatgttgtgaagaatatatcatccagtcagagtgaatcagcttgcccagtgcttggcatatagctgctcaagaaatattaggcattctttgttattataaatcccctttgtattttaaaaycctcatgtatcactgaaacaaccaactgaaaaccattgagaggctcatggtgaaagaagacagacagtgtaatttccctggaaactcaattttgattcagacgtccacagcatctcatttctgcctttaaaaaatttcaagagtgrcattttggcatgaytggactcacaggtggagaaggtatgacaaacattctggaaatcttggaaggtgaaatatagggaagatggcccctatggaggttcattgtcccccaccttattctaaataatgactttcttaaaactacatgttttgggggaatgtcctgcaatattgctttacatctttttatttttttattttattttattttttttgagacagagtctctgtctccaggctggagtgcagtggcacaatctcagctcactgcaacctccacctcccgggttyaagcgattccmctgccctgatcagcttcctgagtagctgggactacaggtgcgcgctatcatgcctggctaattttttgtattttagtagagactgggttccaccatggtggccgggatggtctcgatgtccttacctcatgatctgttcgtctcagcctcccaaagtgctgggatgacaggcatgagccaccgcacgcagcgtattgctttatattttaagactatacactgatatccccgagcmcccaagttcctgtccgctggtagaattcacaaagctggttttatgtctccttctcttcctcttccagtgttgtcttttccctgcattgagatagcattgcatggagatccttgtactcytcgaacagaggctgcagatggacacaggatctgctcagggagataagatcacctgctaattctgctttctccatcagagtctgaatgatcagtgatggggaccagagctaggttaggtctctggaaacgccctctgtctgagtccgggagatggatgatatgggtaatgacttgctgctttatcttctctccatctccttacagcagctccaactactgacttttattgtgtggcagctaattgtaggattctatttctgtaaagagaaggcaagagaggaatgcagtgtccaccatccctgcagccctttggcgccttccccctcccattaccttgaagtagagggaaaggggacgacagaagaacccttagaagtaagactttttctgtctctgatgccacggacctttgaaatatttttttgaaaagaaggcctcccttggctgataccttctgactgttagtgaataaaggaagtttaaacaatctcttccctgtaatcattaatctcgtcttctttgttacaatgtatgttgtggtctttgttacaatgtatgttcacgaattcctagaacactgttcccgttggccatgggatcaggggaagagagaaggaagagagaaccagacacaagttggagggaatccatctccagtgctgctcagaggtatgacctagagcaaggggtttaggctttcttggactcattttcctcggtggtgaagtggggataatttattgacagtggaccgtgaggttctgcgcacaaaattcgttgcatagcacctgatacacacaaagctttcaggcaaggttagtttcgggtatttccagccttagtcttggctgtgggagccataatggagttgttcagaagtttacagctagtgtttataaattgcttgccatggggccttgtatacagtaagcattcattaagtgttccctcctattatatccttaggtttaagatacaggcaccacaacataaaccacccccagagtacacatgcatgggtgtaatttggtgccattctcctcccttttgcccccaccaaaatgaagtttttagtgtaaatgtcatgtagattttaaccaaaggttgattggagggtctgagtttctcagctaaatgaaggcatgaggactgtatccctcctgaagggtgtgatcagttccatgagaaagaagctgcgagctgtggggcatccaagataatgtaatctgccccggggtcctgtgagggactggccgacaaggcaggctgaatgcagccttgcccactgagctgggttctctctgctttaggtcctctctggaggtgaagagggaagtccgctgattgtttttctcttggtgcaacttcgcaccacccttacatatcccagtgtatatggtagccaaggacagtactgtttgagcctcccccattaagtgtcaacattgaatcaatgcaatcccatgcaaasaaagctgagcatgggattgtgccggtttagccagctaaagtgtggtctctgatgctgatcatgactatgaaaagggaaaatggaggagaatgatgacgaaggaggaggaggaggaaaaggtgacttgcctctagctgatgtggattatttctcttttttaatttccatgtctgygtagcttcatcatagatctcarcttaaggacaatgaaagtcgtttattgagtacttagtatgtgctggttgcagagccaagtcttttttttttttttttttttcctccttttttgagagagagagtctcactctgtcacccagactggattgcagtggcacaatctcaactgactgcaacstgcacctctcaggttcaagcaattatcaggcctcaacgtcctgagaagctgggactacaggcatgtaccaccacactcagctaatatttgtatttttagtagaggcggggttttgccatgttgtccaggctggtcttgaacacctgacctcaggtgatctgcctgcctcagcctcccaaagtgctgggattacaggggtgacccaccacacccagccagagtcaagtatttcaagtattagagttgtctgcctgcctccctgtctccctgccttccttccatctgtttgttatctgacttaatctttgaaataacccaatgatacatgatatgcattttctaggtagatagatgaagggttaggaagatgtaacttgtcctaaatcacgtgtcttctaagcggtggaactgattttctcactgactatagatgttgagcccattamtgtgatacctactgccttttaattttaaaagttctcattgttttatcgttttcatcattatcatatgatttacctcttctcttgtgtcttataatccgattggtcatgctgacatactaaaccatattgtttgccactgggaaccaattcatctgtgaaaagtcatacagataggctcgaagaaagagcttggttgtgatgttgttgttgtgacaactgtctcgggggctggagttagagccagggtcccagctgccacagttcatgtaggggtagaccagtgcttccttttgggtgatgaggaagctggatttggcagctggttttgtctggatttgaaagggaggtaatcaggggtgtgctgggagggccagaacgatccacccacgtgttggtgccacccggcartggaaaagcctctggcctcggccttctccggaaggttgtccgcggtgccagtgagagctgcttttcaccttacagcagccccggcctatctctcaggaggcctgctgataatcagtaaatgaaattcacctttccccgattcttgaaaacggaaaagatgagggttgaattatagggcaaatcatgaacactgtcttttttccagcatggtattttgagcggcacagaagggggtaattattttatttggaagaacaaatttaagtttggcagttacctgaaagaaaatttagtgattgccagtccattctctagccttctgaagaagatagattgtaatctttaattaagctatcactcacaccmaaaaaaaaaaaaaaaaaaaaaaaaaagyggggcaaggggttggagaatgttcatatcacattattttggatgtctggggttgcacctggaagctcagatagcaatatctaggcacggctgccagygctctatacattsacgtttgtttaatattttaatttccccatgagtcttaaacctctgcgtggtgtgcaagttgaggcctggtgtatgcacttcggccacgggctttcccaytgtaatgaagatggaatgactccatggatgacctttccgtgcctttgtctgtagcctgccctcctctttaactgaacaccttccagacgagcatgctctgaactcctgaactgstcattctgttctctgagagaattgctcaagctgcagtttatcattatatgcctccaaagactttgtgtttcctrtgtttgacatcgagatagaatttttcataaccctttactagtaataaatttgattgttaagggaccrggttaatcttatttctaataccagcatctgattttaaaaccctgatttaggagcattttctttctgctaccttcctaaaacgcatgggtggaaatgtataaaatatgtcacctgatattggaggattgtttatttctgttcatttggtcctgaatagtacctatgagatgcatttgaaaacttaccttgtttatatgtttcttctgttgcaatttcttccattacctggaatagctgctttggacggcaaaccaagcaatgccctttcacagstgtgggatgaatggggaaagaagtcttggtaaggaagcaattcagagaacatggaagcatctcatggcagcagtcacaattttgtgttgcgtaatatttcaggaacttgcaaccctgataacttgtgcctgcctgtctgtaggcctttaatgatgttttattgaattttggttttccmctagactttgcagtgcatgacacatagtaattgctcaataaatatgtgttcaactgaactatggtggttaggttagtaattagatgcacagacaaaatcacaggaatctgcgtgagccttgtcctactggtaaaggagtcttgtgaggattaattgaaataactcgcaaaaatatccagctctctgtttccctgctaggggctcttgtcataggagccattgttgtagccttagaaaacatacrgcattattttagggggagaggttagagtagaattttaaagagtgcatttctcttccagtaagcaattctgcatcgataaaaagtggagaaagaataagtgaaaaaatatttagttaattcttgttgacagaagtaggacttcaggtccacatatatttcattgtagagtgcacacatgcatttttaagaatttcccgattctcttccacgtgtggacagattggcacatatgtgtgtgtgcaaattgtacttgcagtggctgcctgggaaatgaaatttctgcaccttgccagarcatgttttccctctaaagagaggcagctsataattagtaatgctaatgtcggggtgagatgcaatagataatctaacaccagcaatgatgcccagagcatttatctttgatgctgggaatgcgttcattttctttatcttgccattactgtacctctattgggaaatttactctctcttcatagataggatcmgathcagtacatattyakaaaaccacacttacatttaaatacaggcctttcccatttcacagtgtttctagctcccctttccaatacatctctctctctctttctctctctctctctcwcwctctcamacacacaacacacacacacacacaccgscaaatcagacaccaayataaactgtagagttaacattctttttccaccctcacactttttttagctccgatctgtgttcaatttctgcctgagagagtgawatattcatatatttaggtatagttagaaaaagcaaaatggtaacaatagaatcttgatgggattgatctcctgcagcaaggagcaacagaaaaaaaaaaaaakggaatcaagaacccaggtgctttttataggttaattgtgcagggttatcatgtatctctttaaaatcaccatcttgattctgagctttggttctacacattagaattgttgcctgggcctggatttttccccttgcatgttgcgtgtggtagtccagcacatttgctgattgcaaatatacttgtctcttctcatgggcattactagtactcaggaaatcattgatgtggggtaaaatgagaaaaggattagttttattttggacagataaacaacatgtcattttaccaattgctcattaatgctgatatttcccgtgggtctctgactctgaaatctgcatggagtggttacaccctgggcttgttagctcctacctgagctctgagtttctgtggatttctataggctcctgcaaattttatctagtggatattttgttaaaaaaaaaaaatggggtctcattctgttgccccggctgcagwgcagtgacatgatcataactcatggtgacctcaaattcaygagcccaagcgatcttcccacctcagcctgagtagatgggactacaggcatgtgtcaccatgccaggctaatgtttaaaaatttttcttagaggtagagcctcactttgctgcctargctgatctaraactcctggcttcaagtgatcctcctgccttgagctcccgaagcgctgggaccaatagagatttctctgagaattaggtcccccactattaataaggtcattgtcagctgarttggggaggtggcgtgggtagatacaattaatttagattttttaaaaggcttttgagaatattcggagaacctaatatattttgagacctgacatttattttaaacgtgaaaagcaatttacaaaattgcacatactctataaatacacttctgttataaaaatagacacgtacggccgggcgcggtggctcacgcctgtaatcccagcactytgggaggccgaggcgggcggatcacgaggtcaggagatcgagaccatcccggctaaaacggtgaaaccccgtctctactaaaaatacaaaaaattagccgggcgtagtggcgggcacctgtagkcccarctacttgggaggctgaggcaggagaatggcgtgaacccgggaggcggagcttgcagtgagccgagagcccgccactgyactccagcctgggcgacagagcgagactccgtctcaaaaaaaaaaaaaaaaaaaaaaaaaaaaaaaagacacgtacacagacaaatgttctgacagaaatacactgagatatctacagtgcttgtctctggataggatagggtataatttaattgtttatagttaagttaatgaacttggccagacagacctgggatcaaatcccgcctctatcatgaattggctgtgaggtgtgacattgaaaaagtgatttagcctttgttcccctccaggtccttatctgtaaggtggcagttacaataatacccacctcccagggttatatgtcaatgggttaggcacagacctaggaactcagcaaatggactactatgaagtattagctttttactgtttctggttttctgatttttgtctcctgttgtgaacatacgttgcttttgtaatatgaaaaataaaaaataaaagttaaatttgttttgtttgtaagaatcagttgaggacagatgggactatttgcatggattggtgtcatgtttgaagtcagttaccagagggtttctttcaacagagtatmccmaaaaaaaaaaaaaaaaaaaaaaaaaaaaagtaaattgcacagaccccagcttaggacctggacttaatcttcatgatgtttgtaaagtaatacttcttggagaaacctcccaaatttctatcgacactagacatctcaggatttgaaatgttaagctaacraattgttcatcaggtgtatctccagccctycgtaaacactgccggatggatgaacctacgtaatgatctcctggtgccattttcctgactgtagatacttgggtaaggaggagactttgactctagatgacatgatgtaccctgtgttctgcaagctggagaacatcatgtaraatctgaaaattaggagagagaggcaatcagaaraagacagagtggtgttgcagggacctgcagtcagcctagtcccccagtttgcgtttgaatttggtcccagattttttttgtttttgttttttagtagttaaagctgagagcaaaccacattgcttactattgtcagggaatgaaaactatgcaacagaagccgatgtgcagaggtgaccgtgttcgctggaattgaacttaagcaggttcctaccgcacagatccacacaggagggattgcgtaatgcacccagcagagttgtgctcaactgtgattttataaaagacacagaaacacatattaaatagacaattcttctatcagccctctaaactggcataaccttgaatcataattcaatgaatgcatttctgtgagaagtgaaggtaataagctccaagtgctttcgtttcctttctttctttcttaatgcagggaaaattgagatgggattctcagttaaaacccaaacgacgggcctgggggttgtcacaatgtgatccctgaggatgttagccccaatgtctttctgtagccagaaccaatagaaaaatgagaggaggagagtagaagcagaatagcaaacaatttttcctttcatggtctacctgtgtgactgtgtatatgtccagaaggggatgtggttggggaagggcatagtacacatatttgagcagagtacatgtgtttcatttcttgctcatacgacatgtccagtgtgggctggcatgttcttctgcacagtccctgagggacccggacttatagagtctgtgatctcacagctgctacatctggcacagatggccttcttgatctccagttagggcgagtcacaacagcaattaaatggtttggtctgaagtgtcacgagtcgtttcctcttggctgcctactggctaggccagtcacgtggccctgaagagggtgggaatgtctcatccccctgtgggcttagaagaaaaccagaggtctgtgcacactatggatttttactacaatgatgccctttyacatacagcgagaargattaagaggtactgwattgktggttrataaagtcaaacttgtgaacagagcaaaagggcattgcttggtcattgcagcttccacccatgcaccttacacagaagtttgggccctaacatggaaacttttcaacactggccaaattctgtttgaagcactgtattgagcataccatatgctgaaagacttggaatgcaaaaacctaaggccaagggcacttctcaatattaaacccycagttgtaakggaggcatcaagactataagayccaagaccttaacttttgtgctccttgtcttgtggagggaacatccatcctcaaaacagaaacctgtgagatcccttgaatatactgacaatacactgatgagaattgaatgccccataaattgcatctcccgcagggcctgataggtgccctgtcttcctgcttatgactctgaaaccctgtttatttgtatcaaggacggttggtactttaatcatcaataaactaacatctcaacagcctgccataaatttcttgtcaaaaaaagaggttatgattagaatactgtgattaaagagaatttgtagatagacttacatccctcagtttcaaagcttctagtagtagggcttagaggttcctagagtaggaaaagcctagccaagcagaaacccatgtttttgactttcaggatatttgtgaattaatttacttgcatatattggccaagatctagcataatctcttaatattcartgaataaaaaattgagttttgagagcaaatattttggtaggaaatagagaactgacactaatattctctctgactataattgtaaaacagtagatgtctttcaccaagcgctaacattatattaattattaataaaatccaactccttaataatacwatcatagttaccatttattgagagcactcttctgaacattttgcattctttatttaatcttmcctacaaccttattaagtagacattatcttcatcttattaagtagtcagttcctcatttgcagatgaggaaactggctgactgagttaaatgaatgccaaagtcacagagctgctgagtggcagagttgtaattcccatgcagaactgtgtggcatcaaagccatttttwaactcattgcaatgcacagtgggttaaaatgagatgattgaaaatgagatgtggctgggcatggtggctcacacctctaattccagcactttgagaggataacttgagtccgggagtttgagaccagcctgggcaacagagccagaccatcyatctctacaaaaaatttaaaaattagctgggtatggttgtgcactcctgtggttccagctactcaggagactgcggtagggggatcacttcagcccagaagttcaaggctgcagtgagctgtgatcgytccactgcactctagcatgcgtgacagagtgagactatctcaaaaaagaaaaaatgagattatggccaggggtggtggctcctgcctataatcctagccctttgggaggccaaggtgggaacatcatttgagcccaggagttaaagaccagcctgggcacatagtgagacascagctttacaaaagagagagagagaaagaaagagagagagattatttctagaataagcaaaccaaacgtgaattaagttttcattctcattttagtgattctctaagtacatacccacattctgattccctcagcactttaggactgactgattagcagtaactgccctcccactggtaccactgtggccagggagtgactgcaagggtcaaaacttttgttggggagctgtttggactaagtgaatgtccagccccaactcagggatgttgtattggttctaatctctgcttctgaggaaatggttacctgcagggcgattgtggcctgctcctcgtgggatatattgagatggttccttttaatccatttcttttaaaaaaaaaattctttttaaagagatgggatttcattatgttgcccaggttggcctcaaagtcctgggatgaagagcttctcctgtcttagtctcctgagtagctgggacgacaggtgcctgcaaccatgtctggcttaaatccatccttaaacaagttcaatgttttatttccttcagataaaatgagagtggagagaccacagtgatgcccaggaatagtcatggttggcgattaaatagccattgagtctctattctgaaacaggcaccgtgttcatttgctatggctaacatgacaaaataccacccactggggatattaaacattagaaacttactgtctcacagttctggaggctggaaattcaagacaaagttgctggcagggtctctctgaggcctctctccttggcttgcagacggccgccttcttgctctgtcctcacgtggccttccgtctgtttcttggtgcacatccctggtgtctcttcctcctcttataaggacaccagtcctcttggattagggcaccacgcttatgacatcatttaacttagttaccctttcaaaggctttgtcttgaaatacagtcacatggagggttagaacttcaggatataaatttgagggggacgcagtttagtctgtaacatgctctatgctgggcacaaggaatgttatggtggataaggggaaaatggtccctaccctctgtcagttttttatggaagaagaaagacggtctttaaagaaattyacataattaatcacaaaaagctaatactatgacaaagaatgtaagttactaatacagcttagaacagatgactctaaccttgtgtaggagctagagaaggcttctctgaggaggtgaggttggaactgaagcatgaaagggaacagaagggggtcaggcaggagaaggcttgggaccaggaggtagagaaaacagtagtgtgatcagaactttaaggcccggttctgtatacaacaggtttcgggacttgaaaggcagcccacattgagtgtaactagaaagtgagggcaagagattgttcaaaagaatactggacccagagtttcatcactttgttaattacatctcatattgtgggattgcaattaccttgcccaagaaaagattatttacgattccattgtttatattgtttgttgaaataattaattctcaaaacttctggatacctgagactcagctaggaacttatttttaaaatataaattcctagtcccactccctaaagattctgagttagtacattcaggatggggtctaggaatcagtgtgtttaagaagtgcatcaggttcttctggtactgattgtccatgaaccacactttgagaaagctccatctaaagagataagttactgacgtgtgttaccagagagagcctagaaaacctgggcacaacagtagttgttaagaactaccagacctgggccaggcccggtggctcatgcccgtaatcttagcactttgggaggctgaggcgggtggatcacttgagcccaggggtttcagatcagtctgggcaacatggtgaaaccctacctctacaaaaaatagaaaaaattagctgggcatggtagtgcatgcctgtggtcccagctacttgggaggctgaggttcgagggttgcttgagcctgggaggtcaaagctgcagtgagccaagatcatgccactgcactccagcctgggagagtgtgagaccttgtctcagaaaaaaaaaaaaaaaaacaactacccaaggcctgttggaatgtctgccagtttcaacccacggggatagggtgagatgaacattgattgagcctttacatyggagacactataacaaatgctttgygtacatcagctctttcaaattaatacaattctactagaggggrcactattagtatccccaatttacagatgaaaaaaatgagggacagagaggttagatgtgtatctaaggtcacatagctcacaaacgacacagcatgcacccaaatgccaggtttcaatgaccctgtggtgaagtgtgattgctggcatttgcctagtgttgactgtgctctagacactgtattagttacaagtgattctacttctcattcattaggccatccagaaagccttgtgctttagtctgtcctggctactataacaaaatatcataaactaggtggcttataaacacctgaaatctatttctcatagttcttgaggctgggaagtccaagatcaagctgctggcagattgagtgtttggcaacggcccactttctggttcctagatgttcacctccttgctatgtcctcatatcgkgggaggggcaaagggtctctctatctggcctcttttaagcccttaacccattcatgaaggctttgcctcaatgacctaatcacctcccaaaggccctacctcctaatatattatattggtgattaaatttcaacatatggctgggcgtggtggctcacacctgtaatcccagcactttgggaggctgagatgggcagatcacttgaggtcaggagttcgagaccagcctggccaatgtggtgaaaccccgtcttttctaaaaacattttaaaaattagccgggtgtggtggtgaatgcctgtaatctcaggtactccagaggctgaggcaggagaatcacttgaacccaggaggtggaggttgcagtgagctgagatcacaccactgcactccagcctgggtgacagagcaagactgtctcaaaaaaaaaaaaaaaaaaaaaaaaattcaacwtacsaattttgcgaggacgcaaacatttaatccgtagtactgatgtggatatgatttgagctaagactctgctgttgattctcttcaaaaacttggcagtagcccttggatcccattaattgcattcaacagkcatgtattttattaatttttgttcctaaagaaaaaaaaaaatccagattgcttagaaaataaatgtgactcacgcagagcagaatccgaattttctaagtgatgaacatgttaacatattattttaatctaaagacatcctatccctgaatttagggggagacatttttttaagtaaggtttatttttaaaattgttttgcaaacattttaacagtacatcactgcctcattggatgaatcatatttttaactttcacttcccatcaatttaaacatcatctctcaaggaactgatgggccggttgactctaaatgattttgcctttcatgcagtattgttccatccgcctgccacagaagtgattccaggtcattccaatttatttaattaattttggagatgaaattattttgcccaataactagaatgctaatgggacttagtgtaatggtttagttcaggtttgttggtttgaaaataaacgccttcatttcaatatttgccttttggctgcagcccgttaactggtcacatgctgtaacctcattaacatcaaggcttaattgtaagttaatgtgcacctagtttttgtaaagaaggtttctatcttaactgccaagttttgccccccaaatatagccccaaactggcatttccaacagatggatgggttggtgtaatataattcatgcttttaaacatcatacttttatcggtgccttgataataaatatttgaacttatttttagaagttagaataaagtgaggaaaataaatctcagctctctagagtgtcactgtggtattgagatttgtggaggtgtactacatccgtaattgggagagattgccggtcgtaaaggagggacaatagaacctctgtagaatcaaaggcagaattaaaatctgcatgttaatagctttcctgccagccacgaatagattcattcttcacgtctcaratatataaagcttatttcaaaataaattctggggagcgttcaacctgattgaatctgctgtaagctctgttaatatatttgttcgagtcacttgcactcaaaaggtttttagacagaatatcacttttttatattattcatggtaatgtaattcccccctttaatctcttcagggtttcccattcagtcatgatatgcggttcaragaaagttggatcgaccattaatcatgctatctcgacttctgtgtgtctcctttttgtccatctcttaaatcagtcacttggcagcagcaagacatgtggccactccagaccawttgatcgaaragctcttgttaggagattaggctgctaatctgcaagcgagctaatggaaatcattctgggcaaggaaacaaaactgaacaacattagcaaaatcactacatattataggaatcaagtacattctgaacggcttaatcctacagtttagatatgaascctaagggtaagatgaacgtcttagatgatctgagatatccaaatacctgtaacaaacatttgtatggtgtatgtagggcaggaaccccatcagaattggggaatctttaaaggattttttatttagccagataaaataaacaaggacagagttgactgagaaaaaagaaagaaaaaaaagaaaagtcaggagaggaggactgaaaattcccatcccacccccgcaacaatgaagggaaatgcctaggttgaaaacacgcaatacacattcaataaatgttcatggttgaatgaagttacctggtagggatttaatctttatttcaaaaagagtggctgtgaatctttaaaaatttctttggttctttaacattctcttcttcactaaacccaaattaataattccttactattgkcattaaaagttctcactggatcattccatttatactcagarkaacaaagcaaacccaattatttgagagacactgaaatgaattttgagtctagaacagcatctgcaaactttgcaaaggttcacatgataaatattttctgctttgtggcctacaaggtacctatcacaactactaagctatcatgcattagtgaaagcacatagataatctataarccaatgggcatggttgtgtgacaataaaactttatttagaaaaacaggtggtagactggatttagcttgtgggttgtagtttgctggcctctggtcaagagcacttgtttgtctgggagacataatttcaaaaatcattttcttttttgattttcatggttttagaacatgatattttctactatggatgaatgctcctcttttgaattttcatttttgtctgacataactcaaagtgcttgctttgggagttcttgttaaccctgacaawtcttgtcaaatatcttactcctgggctgtgctggggatggcagcagagtggggtggttggatggraaggcgggaaagagctagcttggagatgatacgcttttccayccttgaataacttgggaaaaagtcaggagtgtggaatgaagaattggaatataaaggctgagggcggacctaattttttttttaaggattaagaaaaaaggagtaagagagatggtatgacttatcacttggctggggactcagcattaattgataaatccactgtaaggaatgcatgacactgtcttttgaagaaagacattgcatgttaggattctgagtaacagtcaatatattcagtgaaacaaatacctaatatattccatgaaacaagtatcgtgaatatattccatgaaacaaatatcatgaatatattgtgtgaaacaaatatcgtgaatatattccatgaaacagatatccagtatattccatgaaacaaatatcatgaatttattccatgaaacaaatatcgtgaatatattccatgaaacaaaatactgtgaaatcataccastgatttttgaagaaacctaatgaaaacagcatgctcctatatcttttttctgggtgatctttagatatctcgtcttccaaacttttgtgtagcattgtctgaattttcccaagaaaggaggatgttgatctcctatttatttatatttatttaaatttttaacctttacattgacccagtgttgtaaggaaatgggagaatattgccctgatgtctgggaaattgggactcccatcctacaattcaagtgttggaatgttgcagggaggctgggctaaggtgttctgttcctgtctctggttcaaaggaaaggaatagcctagacctaaaggattctgtctggtagctgkttgctcttcgcgcctgtgctttgaatggtgaataccctcggcgggaggcaggcacctgatgccactgcccccgccccacctgcccccgccccgtttctcagatcacacaggcaggctgaggagygcttaacaccccagcctcccatgaagcatcctgaaaaagcagactttgtcttcctccatcagctttgtttgtcctctgccgagactccagggacatgattgctcttcattttacgctcgagatcaaaataaacagaaaccactttcagctttcccgttccagggttaagtgcccaagcaggtgttgtttctgttatgtggtttgcagtgagcaaaaccaccccctcttamctgtggcagcaaaggcagggagactttgagacctggggagggctctctgctgtgttaacagaactggctcttggttggggggtggggggcacccattcttggcttcttataacacttcctttctcatgcattacctggggctccctctggaaagaaaatggtggagaggttactggcctgatgacccagggacccaggcagtccttacagggacccagaatttcacawgcaaatgtgacctccaattaaagctggacttgattaaccccatttcccctcaaaagatgatacttgtaatgccgttccgatgaggccgtctcactccgtaaactgtcatctgatttacacaaagccatctgcttccatacggggtgttttatttgggatccaggaggggagaaggcgcatctgccccctccatagcatctgaatcttaatgaataaaagcactgacacttctttaaaagggaatagcgtgatgctatttacagtttatacagttttgtaatccagctccatgctggatatttaccgtcagtcatttgaggaagttcacttctctgctggttttctgagtgagggagcgatgagtagaggagcagctggagggtccaggagccccctgaactgagtatccggtgggaggtcagatttccgcattcagaacgagagctcatacggcatccacgcgtgtctttctcaygcatatccccagcccgagtagaagaggacttctgcatctctgttagttctttctcctcctaagaaaaagcagattttaagtaacttatcatttgttcatttaattactcattctttattccttcttcattcattttccttttctccttcctttctccctctgttctctctgttttaacaggttttattcttattgtggtatggtaaggccaagatgaggaaatgactgctattgcaaagatggtttgttactcacagatccatggggactccacatgccacagggagttacctgggaaagccccagggttgggcaggaggcagagggagagggggagaactgtcaagagttttgagctggaagctattatcctcagcaaactaacacaggaacagaaaaccaaataccgcatggtgtcacttgtaagtgggagctgaacaatgagaacacatggacacagggagggaaacaacacacactggggcttgtgaggagtggggttgggggagggagagcatcaggaagaatagctaatggatgttgggcttaatacctaggcgatgggttgataggtgcagcaaaccaccatggcacagrtttacctatgtaacaaacctgcacatcctgcacatgtaccctggaacttaaatttttttaaaaaatgtttttattgtgattttcacaggaaagaaggggccaggcagggtaagcaggcttaggattggctggcttgggtcatttccatgggctctgggacacaggggttgtctttaggtgtctgacccatggctatggggtgattagggtaggtgggtgtggcctggagttcgagcccaataaagccagtggtgagggtgtggctgtgaattggttggtttgcatttgaactgtggttaccagtgagctgtctactatctctaagaatccgctagagccctgtaaagaaagcctacaagggagcaggttttaggcaataataagtgagcagtatggcgccctaatagaaggagggatgcctgtggccaatatacacggctcaaagttgaccatgatagagaasytttccctagaaggtctgtgagggaggaggcctgggagagacagcagggtgaccagagtaagtgaagtcaccgaggtgccaatgagtgtggccctgcaggtcctgcagacccccctggtggcagtattggtggtcacagctggcaaagggaagtgtggctgcccggagagcttggctgaggttggaacgtgggagtttaagagagcaaactccmacagcttggtgcagagagaaaagtgtagaaaggtcgggtgtcatacagcagagggctgtgatgctctactgaggagtggaagtgtttttctgagggcatcaaacacgccgtcaagcagggaggcaacaaatctgagtygttccacagatactttgagtgcagtacaagttggtaatgggtaacaggctaaaccatgtggcaccccttccctcttatcagcttcttgctaccatgcagaaaagtgctgaaggtggcctgccytaaggcagtagcactagagcagggatggggaggacttgstggccagatgcatgtggacatgatggaaagggaagagaagaactgtcaagattttcactatcagtggtataagccccgtagtaatatgcctagtgttccattattggaacactaagtatgtgggaattatttatatcctaccgctcaaagccatcaccaaggtctgatcgtgaaaattcaaaaaattgcaacctgaggcataaatgggttttaagctccatacagtaaaacytagcatatgaaaacagttctggctgatgggttggtagaarkgatagatatagatacatayatacacatatatgcacagtaatagatataggtaaagaccttgatatatgtacatatattgtatgatacatatccatgcatatacgtgggtgtacacacacaggtacacacaaatatatatgtgcctttggacaaraaaaaatccccaggacagtctcatttggcttttaaaatgctgcagttgaataggaccgtagaggtggcctaaggcagccttccattcagggcacgcagatttggttcctcagctcccttcttctctatttctgagtcacgtgggctgcacctatctgtcagaagcccactgcccacccagagcccctgactctgaatggtggcccagtgctttctgaagacagaggtgggacctggtgctggagacaatccattcctttcacaaagactgtaagccttacccaagcattaattttgctgcatagrcggcctgttctcccacaaagcactgagtaagaagaaaaggggcccggataaaccagcagggcctggcagacaacttctggctcccttgccatttaaggtcccgaggaatgtggagacattggtgggggccagggtgggtttggaaggacggattttttcctctttgtctctatctctctttctctctgtctttttctctttctctcatagttaatgctatgattttgtaaaaaaaaaaaaaaaaaaaaaaattctagtttctcagaatcctcattggaggcatgtgtatatttctaaatttaaatgtattctcctatactgtccggggaaaggaagcatttttcaaccaaactgaaagggaaaggtactcttttttattctaatactcacatttcccaaaacatatccttaatattgtacatttggcacagttattgttgaatacttggaaggcgatgtgtatagcatacagagctgcagctttggactttgtggctttaggtaaattacttattctctttgcacctcagtgtattcttctgactaatggggacagtagcaacatcgatgtctcggggcttctgtgagtattcatcaaggtaatatatgcaggccagtaccacattccccactaaaggagtgccactttttttttttttttttactacttgcattattgttgttgttgttgctgtacgtctgaagggctttagtcctcttatgagcaaggcaaaagggacaatgttcaccctttggactggaagtaagaagcccctgcagttccaaatgactccacatttggaatgatttcacaaggagtgcaaaagaagcctcttgtttgactttgcccacaaatgccagaggaggactcttctgagccatgccaataagaaaaatgagaatgccagcttaaataaatgttatcacaatctctgcagaatcgtgatgtctccgattcttaaaagtgtctactgcagggtatttattattctgtgataataataaatcgctgcttatgaaatgcaaggaatcgagtgtcatggaggggaggaagggaagtaacagggagaagaactgtgagagatggaggtccagccaggcccgggctattaatcatcgccctccattatttcctgaagattcattcattgttccataggtacctagagggtcaattagagaccacagacaggctttttcaaagacgcaagagggtcaattaggccctccttataattttctgctttaacagcaaatgccagcctatcgtgcatcagatgcaagggagtttggaaataaacagggtactttccctcctcctctaaaaaaaaaaaaaaagaaaaaatccaacacagagacatggagacagtcggcgattgggaacgcttggcttgctggctgtcaggatctggttcaaggaaggcaaagggaattttatcaccaactgggacttgagaggagcagagttcttctggtctcagagcacggggaacggtcagggaatttgtatgatggagcaccctgttcccatatctgagatgattcatttatcttgagtgccatcttaactacaattagagtacaattataaagtatctacaatggaaatgggtcttgaaatcaatcgcagctggaccggcgtgcggtgagttgccgtgcccaccacgactgctgtctgtgtttaggacagagttcaaccaaacgtaccggtgtgtgattttgcacaacactgctttgtatttgttttccctgagaccggcaaacacattttttatttattttatttttatttttcgagatggactttcgcttttttgcccagcctggagtgaagtggcatgatctcggctcactgcaaactacccccgcccccgggttcaagcaattstcgcacctcagcctcccaagtaactgggattacaggtgcccaccaccaagcccggctaakttttstattttmaatagagatgaggttttgccatattggtcaggctggtcttgaactcttgacctcaggtgattcacccacctcagcctcccaaagtgcagggattaaggcgtgagccaccgagcccagccggcaaacttaytttaaaacacattgcaataaaataaaaagaaaagggattgtsctaagtgagaagcagagatgaaaatgtggaaggatgattgtgagaagtccacattgctccatttggacttcctttttgtagtgggctattagattttgcctctgcttgtttctgaatacccaagcttgctaacamagggaaagaccaattatcatgattattattatttaccttaagacctgattctacctatctatgatcacatagacatttggaagcaaagagaaatgcttttcatgtgggaaaaaccaataccaacttcagtgatattatttctccgccccccgcaccgggctcttgggaatatctcttagccctcaattgtcacattcattcagcagatgttagcacgtgcaggcaccattctaggtgttggggatacatccaaaaacaagcaggaaaaccccattctcttcatttctggaatgccggagcactgggcccatggagcccgtttcacttacacgtttttgtcgtctttgagtttccaagaagggagtggcactatagctgaagaggatgaccctctatcacagcctttgctaaaaccactgaaaactgtcttatttttcattttgcccggaaatgcgacacataagtgcattcctctagggaaggatttttttttttttttttttttttgagacaggagtctcactctgttgtccaagctggagtgcagtggcgcgatgtcagctcactgcaacctccgcctcctgggttcaaacaattctcctacstcagcctcctgagtagctgggattatagtcacctaccaccatacccagctaatttttgtattttttagtagaaacagtgtttcaccaggttggccaggctgctctcgaactcctgacctcaggtgatctgcccaccttggcctcccaaagtgcagagcaggaatttcattggatttstacactgctgctttttcagagcctggaacagtgccaagcacatagtcggccctcagtgagcatttgttgactaacttaggtcacagatgtggggctgtgattctgaaggccccggctcattcttggctttcagagaggtttgctttcactcctgggcagcagctgccctggctgctgccaccaccgccttcccggaggtcagctttattttcagtgtttttgcccttccgatccctgggtaagaagtaagaaaatttctagtgcctggagtctccatcctcgtttcccagtcatatcctagaagctgcaaattgctggcttgtggatgtctttggtttggcctgctgaagtttgttttggattttttaatgaaataaattagctgtgaacatttaaaacttgggagacatcccatcaaaattgggatttcctgcttatctcgacaaagcagatctggcatcctttgcctgcattttacatttggctacagttggctggacttgagcagcggctgcccctctttagctggggcatgtgccctgtggtttgccatagtacccatcaggcctgcttcactcattgtagaaatggcctggcctcctaggcattggagatttctgttatgctcattcatgagcttgcctgcttacacctagctgttgtgttggttctcataggtctccctgattccagcctccaattcactgagctggcctctgccagtgtcacttctccccagtcttggctttgatcaagcttggaaaggcctggcctttgtgttgtcacattcttctgcctagagtatgccttttccttcaccaaaccaagtggctctttcggaagacttgcctgaatcctagaccccttctctctacaacmttcagtctgagttgggtaccttgcatcctcctttgttcccatactaacccctacaaccatggtcattttgtggttatctgtttaattctctgctggctattccaggctgtcasctccctgactacaaggactttgttgctcacaatcatatccacggcatccacacaagatctggccgctacgtggaaggacacatagttccgtctggcttggagcctagcttgggagagggacagtagtggggaagggtgagcttggagatagagctgaccttcccaggtgcttcagcagttacagcaagattctagatcttaccctgacagtcacagaaagcactgggagcgtttatgaatgttgtggtatctcacataataaggggaccatgcatgtattttagaaagagccctytggcttcagggaagaacgatggatttgtgagggtcaggactggtagcaggtgggctcctagaatagtcccggcaagagatcatggaggccagagccagggatggatatagactaagacatgcctgtagactgagtgtcgaggagcaagtagatcaaattctagcatgagactgggagaaagagatgttctccagccaatggatttatgaaatgaatgaactttttccctttcctcccaagcattgcctggatcaccttgttaatatggtttcttattaaacgtgctggaaaaaagaggctctaagtgcgtatgcttttaaagcaacactattagcaaatggccactggcttcatttttcctgtgcatatatttttgtgtattccgggaggattttcttttctttttctttttaatcctcctcctcaagggaaacattcttctcacaatagcttcctggtagaaagttctaactaatgactttratcgtgtgmatgtattgcagaaatggacaggrcarttctcagcccattcatcttacagacctcaagtgaacaggcacaaaacaacaggctccaccctccttcycccctctatctcatactttacctcaatttatgacttggcttacaatccgttgcagaaagcctagctccccagcttctcctgaatctacgtttttctattttgtctgaactagccaaggtctctggwgtttgctgttatmttgcttcagagaaattagtgacattgaaaggctgttgtcttttttaktgtacttttggttgttaggagaaatttacaaggccatttttttctcccgtctctgcagttcaggagattatattagaaaatattctatacaaaaaatatgcatagtagggcttttctccagctagtagctcagaataagtcaktaytactgaaacaggtaccttttgtggaattgattctgaaatctgtttggatctgaaatctttctttcttgcctttgagtaagayacggcagagaaaaacaattacactagctgctggtctgtatttactggttagaatagaatattattaccatcaagaataacattagtggccaggtgcggtggctcaygcctgtaatcccagcactttgggaggccgaggtgggtggatcacctgaggtcaggagttcaaaaccagcctggccaacatggtgaaacccccgtctctactaaaaatacaaaaattagccgggtgtggcggtgcatgmctgtaatcccagctacttgggaggctgaggcaggagaatcccttgaacctgggaggtggaggttgcagtgagctgagatcacgccattrtactccagtctaggcaacaagagtgaaactctgtctcaaaaaaattaatrataataatgttacaataataataatgttagtgatacatatcattttgaaaccagttcttaagcaattaaaaaaaagcagctatggtgattgagtttttgtgttatgaattttatactctgaaggcatggtcattgtgaatgccaaagaaatgaacaggagaaaattttatttgaaagctgggattgttgcatgctgcagaatttttttttcttttgctattgctgtgtaacaaatgaccacacacttagcagttcacattcacatcttgtttattaactacaattctctagatcagaagcctagacacaatgtgactggcttctctgctcagggtctcttgggkacaaaataaaggtgtccgctggaggaacatcctttcctgcatgctctgtggaagaatccactgccaagctcattcaggatgctggcaggattcagatccttgaagttgtaagactagggcccctgtttcctactgacttctgctggtggctgccctcagytccsagaggcaacccacattccttgacttttggccccctgcatctcaaagccagcaacagaaactctcttgtgcatggagtcccctcctgctttgaatctctctgactttccttgactttgatgtytaggtytggatttcaagggytcagaaactctctcatgcatgtagttccctcctgctttgaatctctctgactttcmttgattttgatgtctaggtctggatttcaagggctcacgtgatgaggatagtttctttatcttaagggcaactgatgtggagtcttaattaacactggcaaaatcccttcatgacagtacctagagtatgaattgactcagtaactggaagaatgcatgcgtacaccatggaccgggaatccgggaggccaatttagaattttatgtatcaaagccccatttttttttgaataacagaaaaaaaaaagagacctgatatttggagagactttttcaaaagcagaaagtttaatataaaagaaagggggtaattgaagaagatataaactgcaaagaaaggatgttaggtagagcgccttatagggaatcagaggttttattacaggcagacacggcttcacctgtgagccgagcaagtgattttgcctgcagagaagaacgcagggttccttctatggctcaggatcttcagttaccagcagtggaagtgaattgaaaatagttggtctcttgagtgacctgatgcaactcattatcttctctgtgccttaacgtctctatctaatttcccattaaaagtaacaggaaaaagcgcaatgacttttgcaccaacctaacaatgggttgacattcaggattgctataatgatgaagcaatggcaaatggagtctttgtttttagccccgtggaggcatatgctgggcactcaacaaacatcacttcccctgcccttttctcagatagagttatccaaacaaattggatgctcaactctggatttgatccaagctctctggaaatctctagcttctcaaactgtttcgtggtggagtgccttttgggcacaggagaaggaaataagagcctcgcgaggtttgggaatgctgcctstagctytyacactgcatgcagaattcctactctgagagctcactttatctcaaaaacccatgcatattctgcatctactctgaattccgcagtgttgtgtgttactatacgatctagtgttttcgttgcttacaagttagattcacactccaggaatgtatctgttcccacatcccctgatgctgagcataccagagttaagggaggcaagcaaggcccytaacctccyaggttcatggaggtacccattctgcacttgttgaccttgagcttgaggactccataaatgtctgcccttggcattgcacgtgcctccctctgggctgaccctgctgggcctgtcacttactcccattggagaggcctgtttccatacatagctctttgtcagttgctcacactcggtcaatacttgccttcctttgaggccatctgcactcactgacaatctgatygctcccctgaatggaggtgaaagcatgcaagctmggagttaagatctttaactcagggaagaccctgtctatggaagtgctgagctcttcagtgtcatcacagaaaagcatgagcscctccctggtacggagtcatcacatcccatagctgagcgacgtcggagctccacgatggggaggtgacacatagtcagttaattacataaagagaacttgagcaaactcttactctgccatatgctgtgcagatccctctgaaaagctttacagatgttcttttttttttttaatccctccccctatctttctttctttgcacccacgatgctctgcacttcaagctaaatataatgtatctgattttacagcatacatactaatcaggtttgaaagttgtcttgtgaggctttaaaaagctagccaagagcagtgcgatttctccaaaaggatgtctgcaatcaagatgattacatgggaaaataaatcataatttatattgctgaaaatgtcatttgcaaaacactttgacaatactttcctttcagtctattttcctgtgtatggggtaagtgttgcccttctgcaactttmcttttattttatttatttmtttcttttcaatackctgaatatcactggagcagctgcagattcagggcagtatggggtggttcaggaacagaactgacaggtattgaagccaaaaaytgaacaataacaacgtaggagggagaatccaaagatagtatgtgttcaggatacgggcactcrtgtgggtgaacacacacacacacacacacacacgcttttttttttttttctttttttttttctcctattgcaatagaacgtaaaggtagatttttagaaccaaatgccttttaggaagctacctctcttccaccctgctgcctttgtgttgaataaactatattaaattatccaggaggaatgattagtgatctgattcattaatatcccttgttattaagaactgtctgtatttgtgtcctggttggcagatattaagtccacagatdccaataattaatatctwtggttgattgtaaaaatggccaccaattcttccctgtcccctgcayatgtacatccttgcactgtgaaattgtagatctcgccctccaaaggtgaagttcgtttgtccactccttgaaccaggatggcatgaaacttgatttgaccaatgaggcatttggaaacacggcacaagcaaaggcttgaaacgtgcttttatgttggtgcttgcccacttgctgtgctacgaacccttttacttytgggtgcgaacaarcccaggctagccttctgggcgatgagagacacaagaccatgtttccatattgccccagccaagagccaacctacagacgcaactgccttgctgacagcagacacctgcccagctgagcccagcccaaattgctgactcatgcaatcttgagctaaaaataagtagctgttgtttatagccactaatatttgtgatggttcattgcacagcaaaattgaatggagacaatacttttgaaattgactcttcgggagctgttgtaaagaagtaaaatgtgtagtgtttgcccttttcctcagctgtaggcctggtatgcagaagtattcagttatttggtgagtgaaccctcgctgatgccctggctagtgttttctgtctcaggaagcatgaacatttcatccagggttatatgctacagggatattcaagaaattgaagatccttgaaaatctagtctccctcacaaggatcaggtggcaggatctaatgggaggggtagagagtgagtgttaacacacagagaacccaggagacctttctcagaggtctcatatsaagaaaagatcatttctcctaagcaatcaatttctttttaaatctgaacctcatatctgagaatattcccttcttttatctggccactcgggagctcaaaaataaatttctggcacccttcttcctggctccagtaaagtcatacaaccatatggtacctctctggcaactaatttcacctatttccttatttgtttaaaaattttaacttaaattttttcccctcaagatctatttacggatcatcagttttattttttcttttctttcctctttttcttttgctcccttttctccccactcttgactcttctctagtttttatatgcagtttgtatttatccatgccatctgaaatcctccttcctttttaacaaggcaagtagaaaacgaaaacaacatcaaaggatacactacmcaattgttggagccctaggamccgagagaagagtacaagcaggttcttgaactgttctctccccagcaactataactggaaggaacctcagtttgtccattcattcattcatcagagcagcatagcagagtagaaggaactctgactttggcattggtgcctctaagtttgaagtctaactccatcactgtgtttctttcctcttgctgatagctgatttgttataaacaaattaccaaaaacgtactggctttaaasaacacatgcttatcatgttgcagttctggggagtcacaagttcaaaatcastctcacctggtcaagatgtcagtagggcttgttccttctggaggctctaggggagaatctgtttccttgcgtttttcatcttctasaggcctcctgcattccttggctcttggccccttcctctggcttcaaaccagcagtttaatatcatcacatctcctttactgattcctcttccgttgtcccatcacattctcctcatctggccctctggccactctcttataaggacccttttgatttcattgggaatacccagataatcttggataatcactccatctcagggtccttaatcacatcttcagagtcccctttgccatggctgatgacagagtcacaaatttggggaattagtgtgtagacttctcttgtagggagtcattattactctaccacaaccactaattctggacttcacgttccctcatccatagagcagggataacaatatcctccaggctatccgcggaagtagagaatataagctttatccagggggccactcagtgatgggagtcttccttatgaagctgtcccagctccatctctcaggactgaaatgtgggtaagaccatcacatttttcatcccccgccccccgsccccaacattgactgggcagatattcatacaatggcgattgttttgtctgcctggatggctttaacataataccatagactgggcaggttaaacagcagacctctattcctcacagtctagaggctgggaagtccaaggtgaagccatgggcacattctgtgsctgcctgaggstctctttctggttcccagatggatgcctttgtgtgtcctctcatggcagagagaggaaggggtctggaacctttctcttataaggatactaatcccatcgtaccccgtcccccatgatctcawttgaaattagtcacctcccaaagccccacctccaagtactgtcmcactggggcatagggcttcagcatatgaatttgggggagctggggagaggaacacatacatttagtccataacaactatctcacttacctctctactaagtgattcagaaaatagcaagtatagtagtgggagaacatggtatcagaaccaggagagggtcctctggctttctgagttctgccaaaaaccaagttttgytgccttgggcctgtggcttytcctccytgattgtcgctggccttgctgtaaattgtgaggcatccatgtgaggcacaggatggttccaaggaccaactgaggctgtctgtgctgaggctgggagggtgtaagtgctcagaggcagccggaagctgtggtttttacctcccaagactgtgcagagcttccttcttctgtagggagaagtctctcaggacagggctcacaacagtgcagtcaggagattggaaattttagtgacaccaaagtgggctttacttcctcctcctagaattcctgccagaaaggtggagatgtgcaataaactgagcaccgatagagtaccaagaacatgctttttgcacattgtttgattcatcaatcagagtggggcatggctgtcatcagttcagagttgaaagaattgaagatcaaaggggtcacgtctctgtgaatagtattagtaatagcagcagtatcgatagcaatcatagtaattaaaatggaagcaaccaccagtgtaatcatagcagaaactcacatgtgtgtgctttctatgtgccaggcatgaggctgaagtcatacattcattatttgttaatcccaccctaagtgatagktgtattcatcattctcagtatcagaagaagaaactgaggttcagaatgacccagtaaagatcacaagcccaaccctggtgaagggcgtgattggcagaagcccaatttaagcccccatcatgtcctgacgctttcccaaagctgagctgcctgccagggtctttgctcttccactgccaagaagtaaggttttggttgggcgcggtggctcacgcctgtaatcccagcactttgggaggccgaggtgggtggatcacgaggtcaggagatcgagaccatcctggttaacaccgtaaaaccccgtctctactaaaaatacaaaaaaaaaaaaaattagcccggcgtggtggcgggtgcctgtagtcccagctactccggaggctgagacaggagaatgtcatgaacccgggaggcggagcttgcagtgagcagagattgcagcactgcactccagcctgggcgacagaaggagactccgtctcaaaaaaaaaaaaaaaaaaaaaaaagaagtgagttttttttgtgtattctgaaaggttcccaagctcgccgcagcctgctattgtatttaaagggtgccctttgctgcgtaactagggcaaagaagaaccaactggctgttccccactggctgtggagagttccagctcatccaccctgcctctgtggctgagtcggggagaaaaggacaaagtttttctcccgcaactgggccaccaaaccagcagagcctccagccrgggtggtctcgaggaggcccattaccggctggagtgacagagtgtgtcaagcctgcagctcgtcccgtgtctaatggaacagaaacaagcaccytgctgcccttgttttccagtggctcaccggggctytgcgaggtttattaatcttagcgtataatggaaaatgtgttgccatgtgaaatctagagcctctgttcactactccgcgaattgaaggcggcaggagtctttgtctcatttacacacagtgcctgcgagagactcttagggcagaagaacgccgtcgtaaaaatccgtgcggaatttgaaagtgtgcattaatgcatgtgaccagatggttctaaaatatgccactttcaccaaaaatcatcctctgaaaaactcttctgaacaacatcggctgtgcatagtaactgccttgagtggggccattttagaaaatatatgaggtacgggatgaagatgagggaggaaaatggttcctacttatcattactttgtccctccaaaagcctgcatgcgggaagaaaaatccacccagtgcaagaaccgtggcagtactcagaccatttagaatcactttgagttattaccaagaaattgctaaccactgctttccaagttatatattaaatttttcttttttttaaaaaaaagcttccaactttttttttttttttttttgagttggagtcgcactctttcacccaggctggagtgcagtggcccgatcctgggtcactgcaacctccgcctcctggattcaagcgagtttcctgccttagcctcccgagtagctgggattacaggcacccgccgccacacccagctgatttttgtattttagtagaggtggggtttcgccatgttggccaggctggtgtcgatttcctgaccttgagtgatctacctgcctcggcctcccaaagtgctgggattgcaggcatgagccacagcgtccagccccaacttcttaaaagccagaaacaactggctgttagctgtcacaatattaatactagtgtgtgcaagtaagtttgttttctgcttctgtcttacacgttttacgggctatcagtagatgcatctaataatcctaacactgtcatccttatacttgaggtcttattgtccacttctaccttagctatgtwaacagatgagtaacctactctggatttacccagatagtgctgttaggcaccacacacgatgagattggaggcacctgggtgtcagcctcttgggctggctcattacaggccactctgtctgaggaacactcaggtttgcaaaccgkttcttaaaatwacaggatacctagggacctgttggggtgggwgggaagaaccctatgggcagaaatgtgactttctgtagcaaagatgtactgtttcccactgagaagawtcaaaaatagaaaagtgcttccttgtctytctatattgttattaaaacaagtagatgcattttcrttgaatcaaggcagttttcctttataaaatgtcctatttcatatcactgttcaaacttgacatccacatttgagttggtttaaaatatcactgttttgttgacattcacctgtattatacatttcagttggtcaagtcatttaatttatcataaaccatttaaggagcagttggagaaaagggggaaaaagttaaatgttaatgattcttttcgtaactgcaattttatcggctcctttttgtacatatatgattatgaagcaatttgyrtgaaatttacaccttttcaaattttgaaaattgccttgttgaaaaagaatcgctgtacttctcaatactacactgattaatcacagttatagagtagacataacatttttattaaactctcagtgagcaggaaaattagcacttcctgcaataacgatactaatttcattastgaacgttttcatttataaagtgcttcttccttatcttgaaccttttatcctcttcttattgaccaaagagagggcatatctttgggagctgctaataaaccatattcgtaatatgatgtgacctcatcgacaggctgctgcttctagctcatcatcttccttgatcataaatacccatcggtacctcttgtcacatggtgctcttagagcttcctctttgaatttcacatgtgataagagatggtttccatcctgaagagcttgcagtgggatggttatcggaaagattaaaactctaaaactaacaggtggatataaatataaagaaaatacagtattttgttgatttatgttcatataacttctttattggtaaaagggagacaggtgagaatacaggaaatccttgtggccttgtttgccttttttagaaatttaactttgcaaacaaactcaggggaaactagtgaggtggaaataaagaatgctagactacgggtctggggcccaagtgttttattaatataaaaacttgcgtataaatgtccagtttcaccaccaaatcctttctgaaacattggtagtagatgaactaatgcaacaatttatttttctttgagacaggatctggagtgtggtggtgcaatcataactcactgcagcctcggtctcctgggctgaagcgatcctcatgccttagtctcccgagtagctgggattacaggcatacaccaccatgcctgcctaattttttttaatttttcttttatagagatgcagtatcgcttgttgctcaggctggtctcatatgcctggactcaagtgatcctcccgcctctgcctctcaaagtacagggattataggtgtgagccacgaagcccagctgctgcagttactcaaccagcttcctactagaagccaggcgtttctcaagcttctgaagacacaaaggtgaaccccagacaagccaggtttacagagtgtgcatttcagtgggggagccagccaaaaaatcagtaaacaccaagataaaatatattccagtggcgatacattttcagaaacaaacaaacatggcactgggctggaaatgaatggcaggggagaaggcgggcggggcaagctttggaaagcacgggcaggtaaggacagggtttcaaaggtgagaaggagctggcagtgtgaatagccaggggaaaagtgttktgggtagaaggaacagaaagtgaaacggtgccctggcaaggcaaagattattcatkgctgaagagactatgttgcccagatgacttgttcatgtaatctgtgatttttaaatttagaattgaggtttgaagggaagtattgctcctttctttatctgcaatgggaaagcttactgtagttacttacagtagaagagaaatgtacatttctgaaaatccactgaggaagaaaggggcagtgatgattctaaatgttaataatgcagacagcctttgctttatgtatcaatttttgtaaatgtgttgcttaaatagatttttatgagccagtaatggtttagaaaggtaaatgacttgcccaaggtcatacacccagtacacttgggagccaaaattcatcatagatgactttgtgaaatgtcccattaaatgtgtatatatatatatagtgtgcattacagcttaacagacacacattcatttgacacattatgttttaactttattaataagtttttgtgggcataggtcttgttttgccaacttgacatgtggattttaaagggcaagtgccttagaatacaaactgtcctataaagaataccatattatcgaaaggatgttcaaactcatcagttagaggcgttgcagttggctgggtgcagtggctcacacctgttatctccgcacttaaggagtccaaggcaggtggattacttgaggtcagaagctccagaccagcctggccaacatggtgaaaccccttctctactaaaaatagaaaattagccaggcgtggtggtatgtgactgcaatcccagctactcgggagggtgaagcaggagaatcgctggaacccgggagacaggttgtagtgagctgagatgtcgccactatactctagcctgggcaacagagctagattccatctcaaaaaaaggcattgctgttaatacaacaatgataagttatttcacactcaccagattggcaaaacgttaagtactaaggtcataacaagcactggaaggatgtggagaaatagggaattttatgcattactgaactgaaacagccattttggaaaatattttggtattacgtaataaagtagtacttagcaacttatgcaatttggttcctataaagatgccttagagaaactgttgagaactaggaaaagctcaggaatgtttctggtgcataatttgtgatagcaagaacctgaaagtcctccaaaagccgtctacaatgaaatggggaaattaatggtggcacattcctgcataggagatagcagtgataatgggtggataccagaacgtgcatcaacacagaagaatctcagcaacataattcaggattaaaacagcgtttacagctgggcacagtggcccacacctgtaatgccagcactttggaaggccacagtcggcagatggcttgagcccaggagtttgattccaacccgggcaacatactgagaccccatctctactaaaaatacaaaaattagccagtgtggtatcatgtgtctgtggtctcaggggtctcaggtacttgggagactgaggagggaggacctcttgagccgggaaggtcgaggctgcagtgagccatgattgtaccactgcactccagcctgggctacagagtaagactctgtctcaaaaaaaaaaaaaaaaaaaaaaaagcatttacataggagaatatatacagtatgattcaatttatagaaagcttaaagtataggcaaagctaaacattcaggatatttgataaaactataaagaaaaccaagggaatgaagaatgcaaaatatgagctagtgttttcccaggtgtgagggacggggcatggttgggaggaaaacagaatggtgccatggcgagagatacacaggggaggtattggaaagttctgtttcttaaaatgagtgacaggtacctaggtagtcattctatatgttattaaagtgtacacacattgcttatgtgaagtcttgttatatgtggcacatatcacataatctgaaagaatctgcttcctgtagtaaaaattaaaaaaattatagccgggcacggtggctcacgcctgtaatcccagcactttgggaggccaaggcaggcggatcacgaggtcaggagagagaccaccctggctaacatgatgaaaccccgtctgtaccaaaaatacaaaaaattagccaggcatggtggcggggtgcctgtagtcccagctgctcaggaggctgaggcaggagaatggcgtgaacccaggaggcagagcttgcagtgagccgagatcgtgccactgcactccagcctgggcaacacagcgtgactccatctcaaaacaaacaaacaaaacaaaacaaaaaaggtttaagaaatgttctagtaccttgaaaccaaaataggtrtcagatacttggctgttttgttttttcttctwagccattttgacctgtgagattttatgtgatgaaaacataagaatgtggtattacaccctgtgakttgaattttccatactccattccattctatatgtcagatgcatcttcctaaaacacacctttgtcacatcactcctctgctcaaaaacattcagtggctccctgggccctctgggactaagtttataatgctcagcttgtcattcctttgcccagtgtactctctgtctcactaatttgttcattattttaatgcattttcttgaatacacttctgtagacagccataagatgggtagcaggaatgctgcactgaaccataatccaaagctttcatcaggttcacttgcttcctgtccttgccacaccatctgctcattctcgatctccacttgaacacacttcacattctccacttgtgtatcattcactattcttgctacataaattaacacaaattttgcagcttaaaacagcacacatttattatttcatggtttctgtggatcaggaatctgagtatcagacttagctgggtcctctgcctagggtttcacaaagttgcaatcatatattggccagggtgtgttctaatttggtagcttgactggggaagaattggcttcccaaatcacccagattactagcagactttatttccttgtagctttttgactcggcctggcttcttgctgactgttggctgttggctggaggtacccctcagctcctagaggcatcaacagttcctgaatatctgggcttttcccacaaagcagcttccttcatcaagccagcaacaagagtytctggggcaagttggtcaacaagatggtgtcttacatgcccaatgtaatcatggaagccatgtatacctcatcacatttgccagatttctgctgattaataccaagtcagaagtcctgcacacattcaaagggaggacactgcacaatggtgtgaataccaggtggtagggattatgtggggccaccttacagtctatcagccacaacttgaagtatcttctctcctctttgctgccaaataatgtctctgaagactgtaagacctgaatcctatctaaagttgtcggtggttgcttccttcctgaaagcaacaagaagcccatgaatgtcttatggcctgaagatctgccttcaaagactactacctgtgttgtcacaaatggcaagatttcatcctttttatggctgaataatatttcactgtatatgtgaaccacatttttaaaaatgcatttctgaacctgaaggacattatgttaagtcaaataagccagacacagacagacaaagacatatgatctgactaacaatgtggaatctgaaaaaaccaagctcatagaatagaaacagagagtgagaatggtggttgctggggctagggggtcagtgaagtggggaggtgttgatctaagggttcaaacttctcgttaataataaaccagttctggagatctaatgtacagcatgagtggtgatggatgtgttaattaattcgattgtgataatcattacacaatgtatatagtaatcaaatcattactttatagaccctgaatatattcaatatttatttttcaattatatatatatatatatatatatatatatatatatatatatatatatatatatatatatatatatatatatatatatatatatatatatatatatatttaaagctgtcatggaaagccttaaagttaaaatacgaagatttttgagaaaaactttgcatattttaattgctgtctggaatcctccttcagmtggratgagaaatcatctctgggttagttctgtccctgraggtgagggccagacaacacatcaaaactgactttttattttttttcaaagttgttaagactatctaagattcagatctccctaawactgttcctagttagtatttagaacgtatttgtttagaggatactagcctgaaatagccctatctccaggttgtctgatgcgatgaggatgtggtgttaatcttacacctacccattagtctataaaactcctgagggatgctcaggaaaccaaaaaggatgtctgcatggaggacaagaaggcacaaatcgtytgatttcaccccatcctaagatcttgtgactymagctttgttttggactggggcattggatctcccacatgccctctcttaagtcgtgcatttgacgcatatttaataagcacctactgtgtgccattagagaccatgatacagttttgaaagcctagcctgaataatggatgacaccctcctaaagccacgatttggtcttgattatttttagcactatgaagaaaaatttcattaaatcacaactctatttacttttaacccaacatggtgaagttatcaacatataatgcctgtctatactttcagatggaaaatgcctagataaatactgcatgggacatttttaaacatgtaaaaaaatcaattttcgtaaggttacatctttttacctctttatataaaacatgctatattaaaagagagattaaattttaccctgtggagtaaaatgcaaacacaaaattatttttttcatttttcagagcatgtactggattatcatttatttatgaggctttttttaatctagaatatatggaaatcttttcttgaagcacaatataatattgaattgggaatgttgtctgacagtttccctcttaccgttgcatagaatgactctcctgtatgaatttttaaaagaaacttcaatatgctatgcatttgaaagggaagaagtaatcaccataatcttgaggtatcttttaaataggcttcctgcgcagttcttctatgtttcaccaacttttctacaacaaataatgcatctgtgatttttcagaactcacaaaatgtccagctttctttcttttattcaaaatttatacttcataattgaagttcacctcccaaaagacatagcttggtttagcatagagctatgatgtgkkttctctttgttccttttgcacactttccttgtctggaggcgttgggcttggatccttcattcttcatgaggctgatgtttttccatttcggtttccttaagtggtgaagctgcacaaccatgaaagcagtgaccacataaaaatgctgctttgaggcctggtacctcatgcctataatcctagcacattggatggcccaggcaggagcatcacttgaggccagaagtttgtgaccagcctgggcactatagtgagaccctgtctctactcacataaaaatattagctgggcatgatggctcataggtgtagtcccagctactcaagaggctaaagggggatatttcttaagcccagaagattcagactgcaatgagctatgattgtgccactgcacttcagcctaggcaacacaacaagaccctgtcccttaaaataaatgctgccttgggtatcttaatcctttctcaagattccttctaaggctaacatttctttgccatccccacactaccatctgctcacttttatatatcttgaccattttatttttcatcccatcttcactccatgtaattagttagctattgctgcagaacaaatcaccccaaaattcagtgattagtttataggtagccccatttcacccatctcattctatagctcaggttgaaagttgagtcatgaattggggaacattcttctcttggtgtaaattagtcaccagtgtctcatagggttgggctgaaacttaacacatcccatcactttgattggctaaagtcagttacataaccaagcccagcttcagaagggaaattgtatgccttacaaggaggtgagaggatggaaaatgaatatttgctgaacagactttytgtccagtttgttgtatttggtggtggtgcagggcaaatatatgtttaaaaccttgttcagatttttagctttcttcagaacagagcttttaaaactgagcatttgtcccctaaattccagcactgcggccatgagtaaagggtgccctgaccacgagcaaatcatttagctggctcacctttcatgcaaccttgaattcaccaggaaggaagttcatgcagccctgggtatgatgccctaattttgagccaagccagctagagttcaagtccaaaccattccacttcctagctttgggacgatgaacaatttacttatgctttctgggctttggttcctaaattatttaaatggggatgattacatacattcatcattttcaccttctcaaagaccttctggacaattccccaattcatagctctgggagacagtgtgttgacactctatttgaccacatcttcctagcagtcttgcggaaggtgccactttgcgaacgatctgttgctaggtaatgtcaatgacatgactttcagtttagcacatgtacagatgaccttgtttgggcttgtgccgttggtaattcagtttcaggatttccgtttgacagaatatattcaagggtggtttcttgctatcagttgtacccttgtggccacagtttttccagataaccaagactcactaatattttcacaagaacatttgtcacctaggtccagatttcagaggaaaaaagtataccgccattgttcttgtataaactttataaaatatttggggaacatcactagccacctgcttccgaaagtacttagatactgtgtcatcttaatacaagacactatgcactaattaagctgttgttgatgcttttttgcctttttgacaattaaaaataatctcataccactggattagtctcttgcctttcaattttatgtttatatacaaatatatgtgcataccaaattttatatatatatatatatatatatatatatattttttttttttttttttttttttggtcggagtctcaccctttcacccaggctggagtgcagtggcgcaatctcggctcactgcaagctccgcctcccgggttcacgccattctcctgcctcagcctcctgagtagctggcactataggcgcccaccaccatgcctggctaattttatgtatttttaatagagacagggtttcaccatgttatcaggatggtctcaatctcctggcctcgtgattcacctgccttggcctcccaaagtgctgggattacaggcgtgagccaccgcggctggcgaaaattatatattatacacacaaacatacacacacgcacacaccaaatttaaaaagacagatacataggcagttgttatgcagtgtttgaaataaatttattkccagctatgggtcatttggaaaaagatcaatatgatgcatcaacataacaagtaaatggaaatgaatacaaccgcatggttttctgaaagcacggtttcctgcgcggcttccagaattgcatccctgacatttggaacatgtgttacatgctacagaacatctgtctgtgaacaggttaatgggaaaggtgcatctctacaaacaaatattacctgtaatgctgttgtagctttgttgattgttgatattacttatgaactttcttgcttttcagaaaccaccaccacaaaagaggcagtaacattagtattacattatacatcttmggcatttttttcctttgcccttttcgtaggtttttgtttgtttgttttttcttgtcagccacttcatcatgtttggtctctcgtctttggctgtgtttttctgtttctagttattgtgggtgttaaaaatcactttaatgattcagcaataattaggaagtccctatttgtgggtgttactttactaactaccagggatgaaaaggcaggttttgctttgttattacgtcacagtttcgtcaaggagataagtacttaaattgcagtagagtgtgacagcatatgtcgacggtgtgagtgatatggaataagagtgagacagggaggcagggcaggctccaaaggcgaagagatgtctgagccaaattgaagggtaaactgagttcaccaggcaaactgaggaagggtactcaggctgaaggatcatgggaggggaggagcgtgagttcctcttaagtgartataaaccagggggtaggaaacaacatgagatgaggctggcgagagagaaggatgcyaggtgaggtgctgtggtgcgccagagactgcggaagtggctttctaattaagaaacagaagccaggaaactcctgtacttcaaggttttggagtgggaaagttgaggaaatgtaagagatcatctctgtctctatcacattaccgacggagaagtgggataagaactaygtgtgttttcacttcttctttctttagagaaaacaaatatcatctgccttgctaggtagttgtgagaaatgaggagataatatctttaaatctcctacggtgatacctggaacatgatggtgcttgggaaatgtctcttcttctgaaatgaggctgcctsgaagactcactggaacccaagcaaagtgtctctgcatttcactccgagccatcgacttctgttctgaatgttaaaatgcaggtggctgtgagggagtcttctgagtcatgccagcgtttaaggcgcttgctcttctttgtgcacattcctgcttttctcaaagcctattgaaagcaagggccatgtttgctgttttctttgacagaggaaattttttttttttttttgagaccgagtcttgctctgtcacccaggctggagtgcagtggtgcaatctcggctcactgcaacctccacctcccaagttcaagtgattctcctgcctcagcctcttgagtaggtgggactataggtgtgtgccagcatgcccggctagcttttgtatttttagtagagatggggtctcactatgttgcccaggctgacctcaaactcctgcagtacagtattgcaccttcctcggcctcccaaagtattggaatatccggtgtgagccactgcacctggcctccaacagaggatttcagtcaatgctgagcaccaattacagattgattgcctctgtgattccaggtaaataaccttgttgtggagctgagtctttcatcaaaaacaaggactcctggcagatgcccagaggcatttataagcagtcccatcacgaacaaattgccaaatgcaaggcctgagcaaaagacacagaaaggatttctttatcgtaagcacacttctctacattacctttataatccamcaactytgstattagtaaattatagaamcaacttttgtaacactatcttgtttscagagtatatgaaaaatttgaagttaaaattcagctccacgaatactgcagtggtgagaaaatggcgacaaagattagtcttctgtgagaagtctgctaattattcttcatttaataatgccatgtatgatggccttcattagaatgaattcttctcaacacctatgcctctttcacctcagacatgccttctaattttctttggtagtgtctgcccacccaggtggtaatttctggtcataagtctaatttagtagccagctaaaggatatctgtgaacccttcgcaaagagtaatctattgaaaaggaacaacaaaaaagtatatctgtgaacttatkaaatgactttaatcatatgaaaatcagccatcagccttattagagtggttgattttttttttratctaagagctttcttggttattttctgttcttaatcattgttgtatatccttaatgygcaggacatgacaccgtataacaagtgttttaaaaatatttacaattctgatcttataaaggaaaaagttacatatggtcctttgaactaattgctaaaatgacactacattaattagataattaagggtcttgagcatgtggctattgtattcattgggctggaagccaaccttttctatagctgagaaaatgggttagcataattcaaaattcaattgctgtaccctttttcatatgaatagataatacagaatgagccttaaatctgggttggaaaaactaacaggaactggttttattttaattgagttttaaagcacttctaggccatctcattgtctttatagtttaaccctttgaagttgtgactgccaacgtgctagtcttgtcgtcttacacgttaatggtaatgatctttttagatttaytgtgaacctctaggaatgttttttttaaccagtaaatgcactgaaacatggaatcaaagtctctttcccgtgggccccttttcattgggaataaatgctacccatagattgaagtagtttataccagtacattttttaggtgccttaacttaccaaggttatttgtcaggaaaattatctcttgtaacaccaggttccctacctttagatgacaggacttaatacaaaagttttccccataccaactagtagtgtaagttgatttcatatccttttatttcataaagttttgcttatcgggtttgtcatcctctatttgmaattaaaatgtgtggtctcgagatgaccttaaagtatctgacccccaaatctaatcactcctagcatctgtgaaaattgacaaatatgtcaggtataacttggggcatcaaaacattgttttaaatatttcgtttgtagacaaggcaaagatcattttcaggttagtcctctgagaaggaacgctgggtgcagaagcatctttggtttctctgctctataatcggcactcattatctatgggtttatacgagcagaaaatgtacagttatatgttcagcacaagtgaattattgattggatttacggccagaagaatgttcctaagtggtcaatacatggccaaagtgtgtcaggtgaaggtaaaaatcaagtaagatctatacttttgatagcaattgctgttggattatgttacgcttgtcatctgaggttactgttgaatatagataaaaatgttaattgtattaatttagacaagaatgtggcttcaatgagtatttcttacaaagtgggagtatcaatttttcttaaatgtagagatttagtttttcaaaaattatattttttatatgacctgacgttgattggcttgcctacattctcttttggtgtatgatgacagtttaaaaattcggatgcattttgcacagaattaagacgttatgtgcaatccttgtgtttctaattatatgttgatcaatgacacctttacaaaactgtcatcagtctattggtggttgattggtccaaccttagcccgatacctctatctccgcttagtcattcctggtgggtgactgatgacccctgcttaacagtaaacttgttatgcatagggttgttagaaaagtcttcatcaatttgagccaaactgtggctcccagctacttccatcaggggtccttattccaccctttgattgcaaaatgccctgaagacctggtatgtcttatgtcagttacaagaggcccttctagtgatgtaccgggaacctcctatgggaaccagagctctgctaattttggggacaagaaatgatgaaaagaagtgccttgttcttggggcatcacagtctcatgacagagtgcatgttgtcaaatgcgcgtttaatcttcttaagctcaacttcatgcaagagacctaggaattcacagagtgaagatgatttctccattcccttctccgagcagagctsttgaagaagatgggagttaggagaagtgaatcttttgttttcgaagcctttgtccttgtgagtctcttaattggggtgtcttgtaatgcaaagtctttaaagatgtgtgytcctgaaactcaggaggctgctctatcccatggttcaaccaaagaaccagggccaaagcagtgctgaaggaacaactgattctcttggccctccttagagtgagggtacaactggctccaaaggaaatgttggcacttccagagtaattctgacagtactcagatttgcttcatgtacccattctagaaccttacctactcaagtgtaagatgagatgccactgtggtatcttcaaaggaatttagaatcatgtcttaatggctccattaagaagaattctttttctsttttctctgaaaagcatcccaggtcataaaatgtaatgtgggattgtaggttttgtgggaagatgcacttggcagcaattccttgagaggaggccttgaaatgtcagggtcccccattcatcttcccaagctgggattgacccagtgataacataatgataatgcagctgctttcaatgtcaagccatcaggcagcgggttgggggggttgcttggcccaggaacccgtgccctgatgtggagttggtaatctagagggttttgagttaagtgcttttgacatggaaaatcaggagccaagggcgaagctgccttttaaatgctctttctgaaagagtccactgcagatgtaattgagcctctcaggtgaagagctttattcgagcaaagctggttagtgttgcatacctgtttgggggaatattttaggcatcctcacaaaactgctatgtgacattgctgaaggtccccagcctccttgctcccaaacacttcaagaaggaaaatgctgttgcagaaatgttgtctaagctttaccattcagtgtggcccagatcaacctgtcccttctttttgtgatcacagtgtgtaattataaagttatttgtgtgtttggtttatgtcttccacactggactgtaagatccatgagatctaggaccacgtctgtcttgatcatttctccttctctaagactaacacaaggcctggcataatcattgtcatcaccatcaccatagctagtatttattgccatatacagttatgtaaaacattgtaagaagtgctttacatcagttattcccaaccatggagtcatgagtcaaagatggtcaaattggccaagatgaaggtgtttgcattttggagaccaagcacttgaatccataaccccaagatgtgactttccaggcttgggatttcgcaacacgtcgcttaatctcttagcttacattttgtcatgagtaaaactgaaacagtaattcccatgtgctgagtttgctgtgaggattaaagacaaggactgttctaagcccggcatataacgggagcccattataagtgaactgaggtgttattttaatatataccttttaaagtttgagtgttaggcatgctgttgagtgaaagaagacagactgttaccagaggacatattctgttctatgataccacttgtgtaaacgtgaaaagcaggcaggaattttccatgtgagagaagtcagaatagcagttagcttaccagggggtggtgatcttaaaggggcaggaaggagccttgtggtatgctggaaattttccattcatctggtgatgtgatcacttggccgtgtgcacgtgtaaaagttcaagctatatgcttaatatttgtgcacgtcggtgcgtgtaagcaatatctcaaaacatttgagagaatttcccattcattgacagaatttttctcccgcctcggtcaaagcacacagtgggttttcccaacaactgaggtgcctgagggttgggtgccaaagaggcagaaaggccgagatgaccgcttgacctaattccctattcagctgaggcctccacccctggcctgttcaaaggcagttacggatcttttactcaaaacctgaacctaaaaagaaattctttagccatgtccgtgtgaactaaattcagcgtcagatgtacaaggctgtggttctgaccacccccgggctatttctgaccacaggacagcttaaatggtgtggcccataaaatgtaatctgcaaactcaggctgaatgttgatctatttagggccaagagaagaccaggccttggcagcagttctccctgaggtaggatcttaggtcgaatggagaccatcaccctggctgccagccccaggaggctggaaattcgttagcattctttatctttggggatcggccacttacttgtggggttgactcttacagcctttgaccacctcccaaaagctggattcactgatgggcccccaactcaactttcactggccaaagtacttggggttaatttagcaaaccccaggatccccagagggtccctcggtattgtggttttctcctcgcttccaccttatagtggctccaccaggacctcttgactcagccagcactccttctcaagtcacttcgcagcacaatccgtttgttgttgctgttgttttttcttttgttttgttttgggtttttttttttgtttttttttgttttttttgtttttttgcctaatttgtgcttggcttctccacagaggcctggttctggtcccttcccctgcaaccccaaggcagggggcagattcccgtatcatggtgctccttggcctgattctgtggsctttatattagaactcaccttctggaatcttttattgtcttgttctctcttccaagctgcgcatcttccttcccttcagaggtttggtgatcagcgtggtggctcgtttctataatcccagcagttttggaggccgagactcggggatcccttgagcccaggaggttagagaccagcctgggcaatatagcaagatgtcatctctaccaaaaaacaacaacaacaaacaaacagacaaacaaaattaggccaggtgtgatggcttatacctgtaatcccaacactttgggaggctgaggtgggaggattgtttgagccccggagttcaagactagcctgggcaacatagcgagaccctgtttcttaagaaaaaagaaacatttaattaaaaattcagaattggaagttgcattgagccaagatcatgccactgcatttcagcctgggtgacagagcaagattctgcctttaaaaagaaagaggtttggtgccaggacgccatgaaataattactctaggtaacctgaggctagacaaacctctccatgtctcagtttccttcctggcaaaatggggaggtaaggccagatttcttctcctttagttttgtttttctacttgaattctatttgtcatcctctgtacctaccacctgccagttgctgtattagatgctgttttactcattgtctaattgaattctccaacaaccttgcaatacgcttgttatctccattttagaaacgagaaaatggtgactcagattaagaaacttgctcaatgtaaccaagtcacaattttaatattaaaaataatgagcatttattaagtgcctgttgaatgtgtaggattttgctaaatctttcacataatctcatttcatctttatcatagcccttatggtgaaaatgccattattctttgacatagaggaattttgattcaggaaggttaagtaatgtgcccagtatcatctatgtataattgatgggtctataatttcagactcaggtttgtttaagtccaaaaatcatgccattatgactgtgtaccatgttgcatgccttcatatccccaatggaaaaatcccttctcccacttttcttaaccctacaagatatgccaagattctatagcatctgaatttgaaaacctctactaattcatgaggcaatctatttgataatggcatgatttagttagtgttccttttttagagataaagcctcacyctgttgcccaggctggagtgcagtggcgtgatcacagcccactgtagccttgacctcccaggctcaacctatcctyttacctcagcctcttgagtggctggaaccacaagcagatgccaccatgcctggctaactttttttttttttttttttttttgtagaaacagagtctctctatgttgcccaggcttgtcttgtactgggctcaagcaatcctcccatcttggcctcccacagtattgggattacaggtgtgagccactgcgtgaggcccagttagtattctttacatttttaaaataaaatttcagagaaagcaaccaaagggagcataactctgataagaataataaaaagaaacaattcagcaactctcttacagatttttatcatcatcccattcataattgattccaracgtgcatgaatctttcaagataagtgtcttattgattaycctgaaaacaagcgatcacttggtgtcctgagattcgctcactgccctcccctgattaccgtaaacagagatgttgatgagaagaaatgtcactttctttggtgttggatccataggacattttgaggaattgggtgtggggagtggagggagtgaagtgacccagatagggaggtgcttgatggcttgactgtggccttcaccttgctttttgtggagctggatatagacatttgttggccagctaatactgtcttgatctgttatatgatccttaggccaggactttttcctggtaattgtgcaaaatgtcccagtgaatgccaattccttgctgtcaggaaacattaagtttcctaagtgacatcctttttctgcatgtttacttatggttatgtaaatcaagcgggcctccccattggaaatgatggcagtggttacaagggacttcacctggtcttttgtagttgtggcaaatagataagatacaaatgtgacctgcaattcagttcagcattatgaagctgtatctgctccctgggtggtggtcacagccctgctttgtggccctaacccttgccttcctgctggcgggccttgcacaggtgcagagagggggttagtattggcaagctaattggataaatggtgaagtttcccctgggtggctccattgctccaggtgaagctcttgaaatactctgtagatgacaatagcctcaaacttgaacaggttcttgcagttggcaaacagaaggagaccagactcataggttttgggtgcggataatggataatctggctattgcatttaattcccagcctgatttattgaggctgcctttggtgaaatattgatttatatcttggggggccaggatggggctactctgtactcagatgaggcttgctctcaggaagttcttgttcagcagcaaaaatctgccctgtttgggctctgaaagttatttttgtagtggcctcacaagtttcttgtagcaggtcatgaagaggaatgaaatactataatcacagagcttgcagaagctgcctggaggaccagttagtctattttttgtacatgaggayactgaggctcagagaaagtgaggtcattgagtcacttgagttcttgttgagtgttctttcctgctgaggtgtcctaggtgcctcttaatgcctttaacatctgctaagagtatgtcacttattgacgtagcatcactttattgagcagctactatgtaccaaacacttagcatatgctttttggcattaggagctgaacccagagtggtctctgtggagaggtgcaggtttacccagggtggtggtagtggtgatggggtggtagtgatagtgttgatagaagaagaggaggaggaggaacttctcaggaagaagtggcagttccctcctttgtttcttatctctactgtttagcagccactctccaaagcctcttgctgggaaygtggccatcatagaagtaaatgagacatctctttcatctgcaccaacctccttattaagaccttatcagttacctgtagattctcccactgttgtacttgtttctccctcaaccaattgtattttagctctcaagttttggcagggttgagtctagtatttctgttgggatccggggagcatatggagtgttgtttgttattttttagagtttcttattgcggtaagtgctcaggagggaacagagggagaaggatagaggaaaagcaaagcaaaacaaaatagaaaagcacaaatgaagaatatttagtccattctgtattagtcctccttgatggggggacacatgccagccaggttacctgattcatctagttgtgattttattgacagtcatttctaccttgttggtatccgcagaggttgtcttgaagggggctgatgccttctttcactagctttatgtggctggcagttctgtcctgccactcttttcctcatcatctcagcctccctgcccatggcactcaagagtcsaccttggcagaacctgcaactcttcagcgcctccctaatgaactccttgcaagggcccttggttaagttacagtagagaagtggttgcttaagcaagtagtttccggtaaaggcataaagatagcccataattgggtgataaaatacctggattgcatctaaaaataaagacttgtgaaggtaaaactgtagcttacagtgtgcgactgtttaccttcttttggtttcttctcatttaataggttggtcatctctctgctggstttttcccccttttttctcccttctgtagaataacatgtggaccattaactatgatgctacttcttagctgcaaggggggaaaaatggaaaactccaggggaagagggtctttacttagggagttggcatttgttggaatttcccaagaacatttcatgattagtgacaggttatcttctastttacctgaaggctatggtcactcaacaaattttgtgttgcttcttacgtgtcacgcactgtgataagtcctaggattatagaagtcaataagctatgatgcctatccttaaggagagaaacacatataggataggaamatagcttgccatgtctgatagatattaggcattcagtctctctctctctctctctctctctgtttattatagatagaaataaaaaaattataaatagaaatttatttctcrtggttctagaggctggaaaattcaagatcaagatgcagacaggcttggtgtctggtgagggctgctttctatccttcaaaaaggcaccacgttgctgtgtccttatttggtggaagcaagtgtgttgaatattctaagaggaatctgaaagtgttatagtattaaggaagacagatccaagatggtggcaatggtcaagaagggtgcgggaagaacccttcaactctaatattatttgagctgctcactgataaataaataggattttcccagttggggaagagggaaaggtttttagggagcagattagacaagaaacattgaaaacacaaagtgtatttcttgatacttgttaacactaggtgttgaggagacataaccaagttctcctgcagtttgtgtgttaaggcagatggaaatgtcttgtaactcagtaaaacagtttagaaatttaaagcctttggagagagtaagtattgagaaggcacatctctacgttgttgaygtgaaggagttgcaaggtcgggtagatgggatcagtgccaggtctaatgggcttcatttgcaagacctaatttctagcagatcatggtgtaagcctcaaatgggaggtgtgcctgggatggttgcagaggagttgttaagagctcagactccagcgtttagacaacaccagctgctacaaaggacactgtgcatttctaaatctgagtttctgcacacgtatggaggagtaatatggcacctcctcatttggttgagatgctctggggtacacgtacaaggcgctcaactcacggtggctccaccagtatgaaaatgtgttatctgccctagtctgaagtacagaagtcaggtggtgagaggtgacatgccatgatgtggttctgcttctctgagattgtctgtcagcttttccctcagtttcacccccctttctccctttttcaagatggttttagcacttccagacattataaccagatagcctattgctagagaacaaagcaccttctcttcctatatgtacctcttgggaacaagggaacctttccccaaagcccctcaacacacttaggctgacatctccttgaccagaactgtatcaaatttacatagcctcaaatgaagcatctgggamcaccaggattgggtgtttaggccatggaagagtaacagcccagtacacaactgtctccagtggccagcacgtagaccttccctcacactttccactctctgcatcccctcttccctctcatgtatctctattacatggagcctcactttatagtcctcattaagagactgtggggtggtagacagataacaatgttaacatcaggcaaatgggttttggatttaggttaccatcatttatcttctctgtaaccttagacgagttgcttgagttctctgagtctcagctgaccaagctctaaaatgagcataaccatatcagtttgtgtttcctgttacagggagaaaagactgagataactaaagtacctgattgastaactgctctctgaaggtggaggctggactgcttcactggacagggtggcctggggttattctagtgcagtggtagctggtgacaaaactsaaagaagatgtaactagagaaaaggtactcagtgcagcctctgtgagctaccaccactgcctctagttttccagaaaaccaccmctgaccactctctgtacagatgcgctcaagcgaccataaccaccagtgttcctaacaatgcgcctattgacttcttatttcaatagatatccagattkattatccctcaaggtaagcatcgattttacctttgtctcagtcaatatttacctctgaggtcaatacgtgtggatattcacctcagctgcagtcaatatccatttcgtattacaatatatgatgtgcrtatgtgaaaataaagaacagcatggtacaaaaaaggtctgctaggcaaagaagctttttgcaaagcggatgtgtttttgttttattttttgtttgtttgtttttactgtgtcactttttagaggtcagattctatttcactaaataggacatatgtgtcttctgccaagatgtggaattttggcaaggctagcatgataacaaataaacattcaagcagtcacttaatgatattgaattgaacacmatttctcagaagttcctgtattaaattacaaccataagaacatacacaagcatgcagattgtaagtgtgatgagaatggaaacattccataggacgcagagttattcctcaagcccctggactcgcagagaatcaggtgtatgaagcaagaggaagaagacaagaatcaggaggcaaagagaaggaggaagaagcctcagtggggttgcttctttttatttcttagagccagagctggaagacaaggcctggcatattttggcaggcctggatcagagcctaggtgtgtaaattaggaattgcatttsgctgctgctaacaaggacccaaacatggtggtaaattcttccacataaaacaacagaaaataagttgttttctggccctgggctggggtggccactccaccgtcatcgatgatccgggctccttttctctttctgctttgtgacattgcttctatcttcatgataactcgctgcccagaatgaccaggcagcatgaaaacgaaaaggtggagagggaactaacttcttcccttttgaagagctttctaagaagccccacccaacactactgcttctctcccagtggtggtgatttagttgcttgagcacagatagctgccagggaggctggaaagtacagccttcagtcctagcaccaatgtgtctaggcaaatacaaaagctctttagccaaggaagaaatgacaacgaatatttgggacccactgggagtttgtgccaaaccaggtgtcattgccctccccaccctaccttgctcccctggrgtgtatcctgattcttttgaggawcacttgatcctgattttttttttatgtgtawagatgggatttcattatattgcccagactggtcttaaactcctggcctcaagcaatccagccacctcggcctcccaaagtgctgggattataggcttgaaccaccatccctggccttgatactgatattttattgtcctaactgacagttttgtctgcccagcattttcccccrtcacccttgtactatcccattttcctttgccatgcacctgtcttcctcttcaggattgatcacaaaatcaaaaccattcctaccagccagaggtgggcacatgacccaggtcagaccagtcacagttcctgattcccggccacagtgcttgatgggggaatgagcatatatcaaaccaggacagtccaagtccttccggggactttgctgccacagttgacagggggaggtatttgcataacttcaccacacacagctaagctggtgatcctgctgcttggcagcatcttcccagcgtacaacagaggaaaactgcctgttgtagttaaaaaaaaaaagagagagagagagagagactgatacmcaaagagaatcagaaaggagtagagatgaaacaaagatagagctagcatgattgcaagctgaggacatacgaggagtccctgggtcagctgggccatacatttgtaagctgtagacaaacaaaaatgatctttgggttccttctttagcaattggagttggaggaggatgaccttagtttgcgtctttgtcccactatcattatatccaacttgtgtaattagaaacactatttaagtctcagtttcgtctcctgtcaattgggaaaatatcgtgaggcggagatgtgagatgtgatcacgtttataaagtctgcggcaagaggatgataaagtcacttctcaactccttctcaactcctcctcctggcttattaatgcccatcctttaacctgtcctctgctttatctcttggaatccttagggcctttttaaccccatatacgaagcaaacctatgtgtatgtgtttgtgtgtgcatcaattcatatggtcctctgcagccttgcaaagtcgattcctgacatttccgtagactgttttttttgttttcagcaatactctccagcagcaaaacccaatccgytcatattcttgcatttgctgcagcaaaacctgacctctctttgtgttacctgagtcttgacgaagaagactgaggaaaggcccccccccccccccrccaaattgtcccgttgtctcttggctggtcttgccagctggcacacagcttcctctgaccaccctgctaggtacaaatcccacatgaaaagtctcaatcacctggctcaaactcatagttttcaggtggcataagccatggcattttcacctcctttcctggttgtttccagaaagggatgatagccccagtgcagtggctctgtatttctcagggcagcgtgggacctcagggtttgtcatggaccacacctttctcctttgtccctttttataactcataggctacctccaacttgacrcttatttaagtttttatttattttatttagcattcagaaaactctatagcctcagtctctcgggatgtaaattaaagcaatttcattttcatagtttctctgtttcaaatccctcattgtttatttaaatagcagcctatgcatattgcaagtaaagaattataattaagagaaccagaagggcctgtctctcaggaaagcagtgatttcctttcacaataaccctatccttactgttgaagacttgyggaaaagggacatggcccagggaaccagagtggtttgggaaagcactttgtcaagaggctkggggaccccagggtggaagytgccatgcgcatgaggytgtgttagcagaggcagtggcagaagaagacattgcaaacctgcaaaagcaacctctgaggatgggtagacatatacttcattgcaggcagctgctgctgaaatagatttggagtcagatgtcatattcctgccagcaggtttagcagtcgtgggactagggaagtggcaatggcaggagcaactggaaatgtcttttttttttyctcctttttcctgaatatggaaccaaagcctgtgtttttcttgctcacatgtgagtcttctccttgcttcaaccctccccgctgacagccacaagactctgcctccctgcagcctgtggaacrtaatattcgttgggatcatacattgaccaaagatccgccatgtctttgcaactaacatactcactcatgacttcacgtggctatgtacaagaccacatctctcaatggtgaggtcctcaatctctccctccccaccacagttagctatcagagatatacggtgtccttaagatagggcaggcagggccacctgccccccagctgaccagtgtggatgtcttgatgatgagccatactcagagtggccctaggatggctcctcagatagctgctggcagaaacctgcactcagtacatctatacatggtgtaatgattgactcaagatamttagcatagccrtcatctcaaacctttattatttgtgatgagaagattcaaaacccgctttttgaactgttctgaaatatgcaataccttgttgttaactgtattcacctttctgtgcaacagggcaccagaatttatttttgctatctaaaatatcaattaaaaatacaataaaactaaaaagaaacctgaactcaggagagtggaaaagaacttcaacattcaaaggggataagacatatactcagagtgggaaaaatactaaatggtaggaagatgagaagttttttactctttgttgtttctgctcattttttatattcaaaatttctaatcatgtgtgactatatatgtattatacatggtaggacttatttttttaatgtgaaagaatataaaacaaaatacgatattatcttttgagtgatatcaacaaaacaaaacatgatatccaaagtcaccctgtatggttggatactttgggtttgccatcttttcttttgttcatttgtttcatgcaatagaaacgttttgagatcctgtctggctgggttctgctaggcctgggtctacagcagtttgctgtcaaggtcttggcccttcaagagcatgtagtgtggtggggaaggtgtacatcagtgaagaggtaatccaggtcacggtgggatgacacaggctgctgtggcaacccacagcaggaatagccagtcctgccccagcagggcgtatcaggggtgctaaggtgacttccaagattgaggttggcgagwtcgtgacaggtgtgcaagatggggtgttccaagactggggacaggacaggtgtgcaaggaccagccagctgaggtagaggaaacctagacctatggaacatgctgatttcaaggtccatttgtggggagaacacggactgtgtcattggaagccagcagggagaatcagttgagaggtaagccgggcctagtagaaagtaagcgaagccctttcattaagtgaacgaagggtgcatggtgagtacacagccatgaaaataaaatgatataaatcagcacggtttcagctgccctcccatctttctactgtgatctcagcagtgatggggctggctttgagggttggagatcacacacacacaatcagccagctctccaaagcaagccccacactctcttgatgctatcctcaataaacatgcggtctaaacagtaaccatgttctagctatgcagatgcagtttaaagacaaatcctttgagcctccagcatgcgatcccctcccaatctcattgctgctcccctaccctcttctgcgtagaagcgctggagccaggtgcttacgacctgggtgctagtatctttgtgaaaactgctcctgacctattgctttgtttattttagccggtgcctttgtagagggaaaacagcttagcaagcatttagtaggtagatccaaagtccccaggagctgttgggaagtccataggtgctgtttccattgctttttcattccttcatatattaatcaaggagtcagtcaatcaattaaacggatactattagcacctactgtgtgccgggcactgtacttggggccatatgcactgctgattcattcatttggattctacggtggctctttacccattgccatcattttgtaggcagtgagtgcccgcatcagtgggcgttttatgttgcaccattttctgagcaatgtctttsgtccaccattaagcatttgtggccgcccaccccacaatatgctttgctttctgctttcagaaacaatactggtgacctgttttaagaaaagctgaaaagccaggacttagatttttctggaaaccttcaaattaacctcattaagtttaaaattgtttttttctcgttcatctctcttgcttttatgctttccaaacccctaaattgtggtgcctcagtgatcttctataacataagttgatagtcaataattgcttaatgggaatcataaatatgagtttatttatatgtgtrtatatatatatatataaaatatatttccatgaatatactgaatgctaagccctccccactttttttttcttttttaaattcagaaatttctagttgtgtttattcccctcgtcagcatactttatcatatcaragccttttcagacactgtaaaactactgagttatgtttgggtcatgttttgcggtatgccctttaatagtgtagctttagaaatgcaattttcagcctctgcttattagaatatgataaagtattcctggtctatgtccagctccactaatctccagactgcgcttcatgaattaagcatgaagattttagtcaatgtgctttcaaagaccaatgtttagggaatcatggattttctacaagctgagggagaaatctataataggaggaactgattttcaaacatcatattctcaagaagaaatgaccacttctggcccagaaacagaaaatatttcactatcagaattttctagaaccagttaaaaccacattgtgctgttaggtttaataaacggattgtgttttaagatgtgtaagactgtctgtcacgtgggaggatttcaaatgactgcttattttggaaagctcatgtagactgggttaaaatcgagaggggaatgcaaattgaatttataaggtattattaacttcttcctctttccccccgccctggcccctgtgcattttggttcattttgctctgatacaattcagcaaatagccagatatttcttgccatggcgagagcttagttgggggagagattttgaccaggcaggctctcaggtcggtgccatcggtgacgccaacacacctcctggcttggtgtgttttgtggcatttggcaggcaaacgttttgaaaagaaatctcctttcaaaaatcacagcactggttgaagcaggagcatctctcccyttaaatgcaaaaggagttaatatgccagtgactacagtgtgcctggaaaggtcactggaggcatttttgtctggggcagcccctggagtcttggcttttgtgcttggtgagaccttatctggcctcttcattgtccccttcatacaaatagatagcttttagtgagcagctactctgcctggcactgttctaaacacatgacaccaatagctcactcagattsccgcctctcaacagggaaactgaagcacaggaagtttcagtgatgcacttaggcaaccagtaagtggcagggtcggcattgaggtcaagactggttggacccctaagtttgaacaatcaaactggactttggggctcacagtttgtttcatgtcaggaaggtgtccgatcagaacctgaatgccagctcaagctgctctcagctaaactccaggggttgctgatggagacttcatcccctcctccagtcccgggatcaagacagaaatgtaaatcacctccaagaatgggtctgcgtcttgcacattttccttttgagaaagaggaaaattctcagctggtctagctttgtctgtgaacctccgggatctctcaggggctttaaattaattaatcaatccacagacattgaactgaatctccaccttgggcttgagactctgcaaagtgcattaaatgggaaggaaaccaaagggcctgctgccctgcccccgccatagcccaagkctgtggccatggctggggaattggcctgtcagttcaatcaggcagcccctctgactggtgtttttcactaagctggccccatggatggccctggtcatgtgtagacatggcctcaggagggccacattcctctcatttccaggcctccccacttaattgttcctgacacagtttggggagaaatgcagcaaaacccaggcctgccaatcaacatttgctcccgagtctcagagcggcccctgaagagacaggttggaccaagggacatccacagatgccttgtgtttaggaagtggggtgtgggcaacagagggagaattgttacccccgggagactgggggtgctgaagaagagtctcagtctctgcactctgggtcttgccaaaacctctgggattgggtgtggtgtccatgttgaggaagggacagtgagctctctaaatgacagtgggtcaaccaccgcatttctaggactcaaagatgccgtgggggtgtattagtctgtttccttgctgttgataaacacatacctgaggctgcataatttatgcaggaaagaggcttagtggactcacagctccacatggctggggaggcctcacaaccatggtggaaggcaaggaggagcaaagtcatatcttacatggttggcagcaggcaaagagtgagcttgtgcagggaaactcccccttataaaaccatccgatctcgtgagacttgttcactatsacgagtaaagcacaggaaagacttgccctcatgattcagttacgttccaccggggccctcccacaacacatgggaattgtgggagcgacagttcaagatgagatttggrtagggacacagccaaaccatatcacagggtcacctgtaggttaccgtaaataagagaaacagaccaagtagagactcagcatagctggagggggggccccagatgacggaaacagccccccagctccagccatttgttactgggttgtttccaacagaatcaaggactcggatttttatgtgaagtcatctccattttaagtattcttttctttccccccaaccctccgtgggttaaagcatccatgtttacagaatgaaagatgagggcaggataccacttctcctagggatcatcatcattttgtggggctatagtccagagaggtgaaggacccatcttgtgactgcacagctaccctgtggcatgactgagactataatcttctggattcttcaggaaaccctggtagctgatgaaactgccctagaacgacagcaagacaatagggccatgaaagcataagccctgaagtctggacactgagagaattctaggcttgacttctctgtacagccatcttgggagtgctcaaccctttgaatcggatgtctagaatggaytcagatgtcactgtgcaggtgactcacgcctagaatcctctgcctatcgtgacagggagaagcctgtgtgaccctgtggccatctcagtctctgcagggcatctgtagctttggaggtacctgggcaagagactgcctttcctactagagcttctgccatccctctgtcactatttaaagcattgcctgcaccctcaacctcgttcagtttccacataatacctggggcagggatgtaaataccctgattttatgtgtcaggccttcaggactcagggtgtataagtgacatggctcctcgcacagcagggatggagaggcaaacccaggttggcctctctgccactcatatagaactcctttatcaccaagattcctttcttcttcagtgccacctgccttattttactcacccagaaggaagccgggtccctctttgcccctttgggtgtttgtgaaaagcaagttgyaaacwctgaattctataaactgttggagacagrttctggagagacactcaggcttagctctagaaagaaacgggtaagacagaggaggttcagggcaactgtgttgccttccttgactggtgcatgggaattccccagcagagagaaaaaaaaaaaaagaaaggaaaaaaaccagaaaggagaatagaatctattatctccaagccattattcacacacacataccccaccgccattttccaaattgtaaggtctttttatataagcactttccgttaaaggggaagaaatagctttacccgtggtgtaaaatatatactttctaatgtaaatcaagaagctatgaataccataataagaatgtggtagtatattaattgatggaaattgtagagtggaatattcataatcagcagaagtcttttctctggaaggaacaaaggattaagttagggagacagtaatggtattgttagcaggctatttcaatgattttctctgcrgaagagtagggaaaggtgacattccaactgggaatattmgactctgcagatccctactcggagtttttcagccctgttttaagtgccgagctgggttttgcctcatgatccaattgttttattagcgaaatcatcatctrtttcattttgctttggtaatagtgcagtgtctgtctaacaataaattatagagtcaggcaaacaatggtttcgtattagggatataatgaaatatcttattaaaatgcagacttccttaggttcctgaaattagagtcttattttaaaatgattctgttgggcttattacacgcttttgaactaatcacactagtagaatctctctttagtcagagcatagaggactgtgagagttacctcttacttcagtattttcccattcgtattttattctcctgttctcttctggatagatctggatagattttttttagacagagtctcgatctgacagccagactggagtgcagtggtgtaatctcggcttactgcaaccttcacctcctaggttccagcgattctcctgcctcagcctcctgagtagctgggactaaaggcacgtgccaccactcctggctaattttttatatttttagtggagacggggtttcactatattggccaggctgatctcgaactcctgcccttgtgatccacccacctcggcctctcaaagtgctgggattacaggtgctagccaccacacccggcctcttctcgatagatcttatttggctgacaacgaaagctgttgtgctggtagcatcatccctttgcatgcaaaagataaactgaaatctraagtagccatatccttccggccaggtttttcaagtggttactctgttctgatcattgtcatgacaggaatagtgaaaataacaataaatcatttttctttaacgatccatttactgtatgctgggcactgcacaaaatggtttacatggtttatcttgtagcgttccatttaagtctgctaagagtagatgctatcattctctccattttacagataagaaaattgaggcttagagaaattgagtaatttttgccaatcctgagacttgaatctccgctctgtcttctgcatacactttttacttgtcattgctgattagctttctctttccatctccctgatcagaaccattctgcgttcttagattcaacaaaatgtaatactccaccttgccagtatctagcgtgttttcagaaattgtgaacggggtggaggtggagtactaactgcaatcagatgttttatttgtttatttatttttccttcttgcgttgctcttaagcccccactcttgggcaaggctctgtgctatgctgttttatgcacatcatcttctaacagcttctctgccacacctggagaagtgccaatatcattttcatggcacagataaggcattggatgctcatagtttaagtcatcaggtggtgactggaggagccagaaggtccctttgggcctgtcctctcaccagcatcaactgcaccaaaaagatctcattctgattatcagggatgaacccccccactgggtgatcaggcaaactacatgcattttaaaaaactatatcctgctgggtgcagtgcctcatgcctgcaatcccagcattttgggaggttgaggaggacggattacttgaggccaggagttcgagaccagcctggccaacatggtgaaaccccatctcacctaaaaataaaaaattagctgggcgtggtggcagccacctgtagtcccagctactcaggagactgaggcaggagaatcgcttgaacccaggaggaggaggttgcagtgaactaagattgtgccactgcactccaacctgggcaacagagtgagacactctcaaaataagtaaataaatataaaataaaataaaaaatatgtcctgtaatgaaattgaaagagaacactttgtttcttatctagttggaacaagtggggtggggacagacaagtgactgaccactctccatctgactcagtgtcagtagactctctcaaaaattagaagctggctgacatagtggctcacacctgtaatcccagcacttcaggaggctgacgtgggaggattgcttgagcctaggagttcaagatcagcctgggtaacatagggaaacccttctactacaagacatagaagaaaattagttggccatggtggcacacacctatagtcccagctactaaggaggctgaggcggtaggatcgcttgatcccgggaggtggaggctgcagtgagctgtgatcacgccactgaattctagcctgggtgaccgagaccttgtctaaaaaataaataaataaataaaattagaatctgaattttgaagacacaaattcagatgcatgtggatgggcccaaaatactttgtttacatgtactccaaatgtaactcctggggcacccttccttattttctctaccacaccaatgccttcatggtcttacatcttgtcctcttaaccctgacttctctagccctcatgaatgctttagtgtggcagatgttactgtacatgggccctcgtttattcagcaaatattcatggagcccttgtaccaagcacggtgctgagtgatgctgtgagggtgagcaaaagagaattgtcatctgttaaatcccagaggtccgtctgtgacaaaactttcaccattcttttgtaaaaattagaaaaatacaaaatagtgagtttttcatgagctacgttgtatcaattttaaagtatttcttttaggattctattatttaccctttttcttcaatgttaaataccatttcctttaataaagatttaaaaaagattccttccttccttcccccctccctccttcccttcccccctccctccttcccttcctccctccctccttcccttcctccctccctccctccctgtcttcttccctccctccctcccttctttccttcctttctttccttcctccctccctcactccctccttccctttttccctccctctctcccttcctcccttcttttctttcctttttaaatgctgattttgttttctttttaaagccctcagttggcaaacttaaaagttgttaagtctgtgttagcctggctagctttttttttctctactagaccttcaaagtctaggaatgcctgatgtatctgtatcctgtgagtttgccacttcatgatatttgatatgtcattgtttccccataattttttcattgttagcgttgtctctccagcctcctgcttcctcttcctctgtctccctcatggtgtgtcttgctcaggcatgtcttatataatcaatatttagtgatttgacttcttaagtccttaaaaaaaaaaaaatccaggtgcaaaacacaaagacagggctcatgtcaagggagggaacctcgctcttctactctcagtgaaagaaaggcaagaccactccagcctattttttttttctttcccttggcccttgtcaaaagggtagccagttttctgttaccattgtgctaactgaagaatggaaaatatgcccagagtttaaaaaaaatcaaccaatgcctgccctttctagagcaacctaattaacaacccaaatgttaaaatttctttatttagaaactcagctatccagaattacaactccgcctctcgtgcttggaggcatagttctttgtcatattcctgagtgtctacagatgatgaaaatagccagttatctttgcccttcatggaaaggataggaagaagctctgatgaagcaatgttggggcactcatggttaaattgaacctttcccctggttaagtggagtgtgtgtgtgtgttgttctttttttccagcaccatatttggccctataattaatatgcaagttcaaatacctcttgcatggagcaagaagctgaaacatgcgcatttgtaatagactcagcatctgaattgaatgggcagctttggctggagtagtactgcagcttctcgaatgcctattgtcaaaatatatactagttaggagacacattctgctacgagggatgccctcccaaattaaagacactgttcagtttacgcttaacatttatggctatcaaactactagtccacaaccaatcatcatggtttcgttaacacagtcaaaatttaccactgggctattattaaaacttaatataattaatgtaaaaacacatacttcttttcaacaaaaactggctctctttgtagtctcttttttaatttggtgcaatcacttaaaaagtttagcasatttaaaattttacatcattttaaaattgtttctcttttataagaaggatgctatttactattaatgtagaagtacaaaggaaacggttactttggatttattcttttggaaaattagaatgtgggctacatgcttttcagaagttgatgaccaagagaagaaagaaagaaaaaaaaaagggtgcttgatgccctgctcctgctatgtccgggaatttcttgtacccttcatatgagcccctctgaacaaaagcaaatcctgttgacctgtcagcttaaaaagacaagaaatatgccacattccgcaggaataaggagaaaagaatggtgcgaaaatcagtgacacgaagttgaatatgtgaacacatccagacaaatgtgaagccagcccgattaggacgactgaaagggcatttccccagaattgcagttttttttttttttttttttttttaaataggggacgctattgtcattcagaaagccacaggctgttctgaaaacaggcaaaaatcaatagcccacttgttgaggataagtgaattagcctgtgttgaatgtaactgagtacctgaacacttgagtgggcagggattgttggggagaaaagacaattgtcttttatgtccacagcggttcacatcgctgattaattatgtccaatgatcatttttgtgcaggactaatgggcagactctgtttttgtttttgtctgtctgcccacaacctggtgaactgaatagagttccccacttctcagaacaatgcaaatggtggccaaggggctgtggaagagttgccagaaatggaatgattcagattggatgaaaagttgattttattaattagttaaaatacaaaatgagaaaacagaaaacacaataaatacacagttaataaaatacttcatattttattataaaaacattaattactttaataaagcggtttatattttcaaatacaatatttaataaactatattaaaaatatatacaaaatagttgtaagaatcggggctcctgtgagtacgtaaatgaaatacgcttacatcatttacttctcttcccttttgtttgtgagtccagagacgatggaagagtttggaaagttgtcagcttatctttgcatatatttgtccaatgataattaagcacaaattgtttcaaaaatctttcaaaaattgttataaagatttttattggtgctaagggctgtaatttagcaaagtcttacacctgaaaccaaccaaagggtcttagagtgtgaactgttgtcttagacccggagaagtctccaaagaatgaccatccgaggcattcagctggcgtaagaggagtgactcatttgttcttctttttttttttttttttggctgtctacagagaaggaggatataggggcccttaagagaaaaactggagtagggtgtgtgtgtgtttgttttggtcaagggcagagtgtgctgtgtcagggtgtttcattgcattttcatatttgtcatttctctttggagcgtgtcttttggtgccacggaaaagggctggattttctatcrggtacaataggtacctgcagggcttagggtacaagagcttgtcggggacctgcacacatgtttgagacctgtaaaaatattgctggctctgaattatggaaagaaaatcgcaaagttaaaatctatcaaagtataattaaatacctacaaaacataatattatgtcactagtcaaccgcaacacaaatcttatatcattagatttcagtgatattgaatgtgggagatggaaccattttagtgcatttgatatgatgtgatgtggctttctccaagcctgagagtgcctgaaacccagagaggtcgtacgttgaccatgccacggggcccttcctggtaaatctaagcagaaatacaccatgcatgagacagaacaaagaaaagaactgtgaaaatacactcaggaccaggatgctgatacagtcatgaggttcagcttaaaaggccagtttctctactgcagaataatgaggtctatcctgttttgctttctttcaaagcccttaccatttatgaaaccagattgcaagtctgtttgaatcccccaaatgcctgtgctacataactgtctccttactctgtgctcttgccccaggcagagtggaagttgccttataaagctgcgacttggccacagtgttttccctttcagcagggaaaccggagttctccstgctgttgggaggttcaagagccactctgtgcagaaatgcccagaaagagttaagtgaggtaagttcgtcagacttctgcagacccatactgtggaagggtcaagtgcagggtcaccaacccgttccatcttcctgtcagttggcgtccacccttggtttcaaagggaacaggcattactgacatgacsggacctttacagttcccagctgctcatttggagtactgcggacccaggacaactaaagccggggtcgcctgccctccaggggttcctgggttgaagtatctgttccctccctttattttttctagcctttatagaaatgacaaagggtcaggtggtcttaaattccaaatctgggcacatgaatggtctgacctcggaaacttmctatatgctcgaaacgatttaactagcagcaataaaatctctactctttttatgacaaataatctagcatgtctggggagcatatttgattcttcatatttgggacccttttttaaaggctgagttttattaaaatgatagaaaaattagttattaaacagtatgtcaaatacctttctgtcccaccagatttatttttaaagacaaacattacagaggggcaggggaaggttatatttgaaatctttctatcctttctctaaaatatatttggtgaaaactaggaagtgttgatagatatcattgtttcctgacaggtttttggtgtttgcatcttgaaagtaaaactgccaagttatttttttgttctggtttttgttttttaagcttttctttgataacctcattttcaaggggaggcttagcactgatgtattttattttcttgctcagagaggaaacactgaaatagctatatgcttccccaccaggagagtggaagaatcttgcttttaaagcgatagtcctattttctaagtaaaagtccaggcatgtgacttaaaaaagaaaaaaaaaaatgttttctggtcaagtcacatgcctctgaggtttktttttttctttctttcttttctttttttttctttttcccagactcctcatacccctcytaggagacagtgattccctggcttcaccaggcaggctcttgggggcttcctggtccctgtcactcttaaaatgcagcctgtctttggacatctactccaagtttgcattctgccttgccttgtcagtctgggctatcaaaaatatagtttcgtttggaaaacaaaggggtgaggtgggtccaaagtacaggaagctataccatgcaaatgaaaatattttttccaaagccatctgctaatccctgtgatttaaaaatgtgcgtgtttttagtttctgtctaatttcaaccttttcttgctttagtgattaattaccaggtttctctattaagagcttgtgcgtgtgtagggggtagcatagaataaacaggctcagagcccccacccccacccccctttaagtaacagtgacgcaaacgacctttatttagcagaaggtagctctgcgaatccgctgaatgtccgattgcgatctcgctggaaagactgctgcttcagcaaggtttctttgctggtctgtggcaaggtccctgcttcattttcaaggtgtcctcacttggtgcctttgaagggtttttaatggattcgcttgatataccttccaaatggagtactttgtgcgttaattcagtttgtgataaagatcccttttaccctccttttcataattcttcccagagatatgaagtacactagaaggttagatgtggcatttaatttttccacaaaacctatccatagagggggaaaaaaagattcaatttcattactattcatgtgtaagaatattgaaggtggtatactaaaggagataactatttcttcttctatcaaaggaagaacaaatctgtctttgaacgaggagctcaattcttatttaaaagataaaaggtcacctacaatactcattcctttaaagctatagtgttggggtgggaaggaagctgtcttacctggacatattaattttaaattttgcttgaaaaaattgctcagtgcatttattgactagtctctctgtgtgagttctgaaagtctgtttatatctgttgccccttctcctaaagtgaacccagatatgtgggtatggggtgctagtttttatattaggtctgagatgtggaaaacagaaatctaacttagggatgtatcataatcaaaccgtcggggctaatggcatggctctgatattataaaatctggaggtttggaatgcagcaaactctgggggcattatcattattattattaatagtttgtatttacaaatgtggcattaagtagaacaacgtattcttgcaattaatgacaggaagcctacaatttctcattaagcacaggacagtgagaacgaacagaatttcagagacatgtttcttaacattaaaaacaacaaaaacaacaacaacaacaaaaaaccaagtaggaagcaggcagagttgcaatatgaagaacaatttcaatcatatgttgtttaattgagtttaacaagtaaatgtatatcccagtgtgtgtggtcaccaaagcataatgacaagttgttcatcatttaattagagatttgcttattgaaacgactgaaataggtagttgaaattttgcccttggacaagggagtaatttgtgatttgctacgttcatttcgtgagacttttggtgaaagacatctccttctcatatgtttaggcaagcgttgatgacatcaacctagccttttattttaaatcccctgtcaacgcaattagataatacaaaaataacaaaactataggaggttgaggatggggctgggggccaaggagattacttggtttgaaatgaataaattgtctatcgtaagggaattctttggtgcattttattgtgtgaaatgagcctggtcatatgactgccctgcctccctggaggcctccctgccctcctccttcccacagacacttatgggaggtactggccarctctgtatggccagtactgccctaagcaagaccaagaagcttagtctcaatttcagagagttattttggcaacatatttgggaaaatgatagttagatgctgcgttagccagcctctgcatgattttttacgcaraacaaacagttccaaatatcagtgctttcagcaactcatatatttctcacttatggtgcatgtcgctgatggttggctgctgctctgatctcactccagtatcagcttcagtcaaggaacgtattgttgtcaaggaaaggaaaaagaacagtggtgagaccaaaggatcttaaagtttctactttggaaggggcgtggcattgcttctctcattccattggctgaagcaaatcatgtatacaagccagaagccaatgagctataggaagggtagcaaagaacagaacagccatacagcctagcccacagatggggtcaagaagattcaataggcattggctgaagacttaagacttctcaagcaagttggatcctggtgtgcacctggcatatcctttaggattctttagtgttggtagattgagatggaaatgaggaaacttgtattacctactcctttgggccagaatttgcttacagcacagtgaggaggtattctttggagagcactgtttcccaagagtgattctaacaaagaggtgtaaatggacaagaatgaaaagcaattgcaagggccyttgaaggtttgtgaaggatggcaaagtgacttggatgttgatttctaaaggaggtraaacttgaaggtagacaagctctttgtgtccatacatttgatgggtcatcctatgaaggagggcccatctcttacggcaggcagcgtggcgtaggcctcagagtcaggcatctggggcccagccttttctctgcaggtgcgggtggctcttggcacatgatgtaggtttttgtttttgttttgttttgtagacagagctcaatcttttgcctaggccatagtgcagtgtacaatcagatttcattgcagcctggaactcatgggctcaagcattcctcccacatcagcctgccaagtaggactacagttgtgcactaccacacctggctatttttaattttagtttctgtagagacagagacttgctgtgttgcccaggctggtctcaaactcctggcctctcaagccatcctccagcctcagcctcccaaagtgctgggattacaggcatgagccaccccacccagcccatgttaattttttcacctacaaaatgaaggctacaatatttactttgcaggattgctgtaaggattagaaccaccgtctctaaggcattcagcatagtcccttagggtaamatgagtgctcaagaaatagtaaattttartatgtgtctcatttttttccagatgctctggggtcactaccaaccttgcctttcaccctacctgtggatctatgaccctgtccttctcagaacaccactcagtacttctgggttccccaagaggtgcctcttgagagtttgtaggaaactgtgctttagtaactcatggtttctgccctcagcttctcttgcatggggccttcctgcttgctcctctgctcacaatgacaagtgaggactcccctccatgccttttgatgctggtgcccatcaccccgatcacatgaacgtctatgcccaggtcccatttcctgacattcccaacatctctaccttctccgggcctagggcagggatcactstttcagaaacatgagcgtatggaagccccagtgtgttccttgaagtcccgatgcgtgatttgtccccatgctgtgtcgcacttggtcatctggaccctggggttgcctgagtgtccctgttacaaggcccctcctgaaaccagattggtgtctatgagggtcatctgggaaacctacctctggcagaatcgctgtcctgccagtttcctctcccccttacaagggacatttatgctttctccctctacaaaacctgcatgcaaattatctgatggaattgacccatagtgggtgttctccactggttcaacacacctgaattccggattcaagatgcaatcaccactactgttgttgtgtaagtattgctagagatggctgcagaatacctgggaaagctagctaagcagtgactggaggaaggccccagctctttggaacgaactttccagccgagaatgctttccaaaatgggaacaagatcccaaccccttatcagaaactttgggggccggatgtgtttcagaattcagaagttttcaaattttaagaagagaatacactgcgtattctgtgtattacaggggtcagcaaattcacagcccataggccaaatctggcctgtttttgtaaataaagttttattgctatacagctgtacctgttggtttacgtactgcgatggctgctttcagctacgttggcagagctcagtagtcatgacagtaaccatatgcccacaaagcctaaaatatttactatctggctctttgcagaaaatgcgctgaaccttgcrtgttgtgtcacccctggaggtagcaccttgtaattaagcacatgaatatctcacatcagaatgaatgaatattcacactcagtgggacaaacaacttctgtcagctgtagactgcttttgccatcaaatggttattgaaagaactatctgtgttgacagccttttgggtttcatacagtcctttccagcttgggcagtatagataaatagaygcacaaagcagagggaatcaagtagaataacatggtttatttgtgtgtgtattgttctgtttttggtaaaatcatgcttatcatatcttcartgcatcatttattctgagtccacattgctgcctttgagccggggccctgaggtatctcctatactctggctggggtgagggcggcaggtcctctgggccagcccagatccaccctgttcacggtgtgtgtcctgctgggctcacttctgaagctgaccttggggagcagattgaacacctgttgatgccattctcttaatttcaggggaatgtgtgggtctttgagctagagagacataggtgtatggcagatgagggaccaccccctccaccttagtccagttacagggcctcgcctttttgatactaacgctacatgaagagggacggggccaacagcaggctcttccttgacgtgttttatgtacactccagaaatattgacagagttgtctttttgttttggtttttaaatgtttttttaagttaacttctggaatgcatgtgcagaacgtgcaggcttgttacataggtatacatgtgccatggtggtttgctgcagccatcaagccatcttttaaatccattcttagattttccttttccatagctctttgtgatgcttgctttaatcagttgatacatgtttaatcacgttttgctctgggctgtgttatatacagctccctccctaatcttgctagaaggtagggctaatgcattgtcaattcagaaatagggggtgttcctgagtctggggacactctagtgaaattctatgkgtaaaataatttgtacaagtttatatttttagctaaattaaaatactcacattcccattattttttagaggttgtaagctaagtaataacattctagaaactctctgttttttgaaaggkcatcaccactgttgaaggcgctaatgggagatcctaagtttcaggctctgctacagacgtcaggtcccctaggagttgggctgcctttgctctcctctccgcgactcggtacctggtgtatagttggctaaaaagaagttgttggggctgggtgcagcacctcacacctgtaatttcaacacgtagggaggctgaggcaggaggatctcctgaagcccagaattcaagaccaggctgggcagcatagcackacccatctctactataaatttaaaaattaactgggtgtggtggtgcacatctctagtctcagctgcttgggactactagaaaggtaaggcaagagaatcccctgagcccaggagttggaggttgctgcagctatgttcgcaccactgtattccagtctgggcaacagagcaagaccccatttccaaaaaataaatgaaataaataaatacataataaataaacagtagtggttgaaagaaagggaaggaagaaatgctgttttaggaaatcaataggataatttttttttttttttgargcggagtctcactctgttgcccaggctggagtgcagtggcacagtctcsgctcactgtaagctccgcctcccgagttcacgccattctcctgcctcagcctcccgagtagttgggactacaggcgcccgccaccacactcagctaattttttgtatttttagtagagacagggtttcactgtgttagccaggatggtctcgatctcctgacctcgtgatctgcctgccttggcctcccaaagtgctgggattacaggcgtgaactactgtgcctggccaggataatctttaagaagaagataacattagctattcttctcacttcctacgtagaattccmtaccctgtgtctttggcctggaaagggtattggtagcaattgtcttcggctttccctgccatgtgtatgcattcccacggccacacaagcacacacacacttttgtggttttttttttaattatataagcaagtaggatgtttgtcttagtttttttgggctgctataacaaaatgccatggactgaataatatataaacaacggaaatgtatttctcacaattccggaggctgagaagtccaagaggaaggcactggcagattcagtgtccggtgaggatttgtttttgatctcataggtgtccatcttgctattttctcaactagcagaggcaactctctggggtatcttttaaaagggcactaatggccaggmgtggtggctcacacctgtaatcccagcactttgggaggccgaggcaggtgtctcggtggatcacttgaggtcaggaggtcgagaccagcctggctgacatggtgaaaccctgtctctactaaaactaaaaacttagccaggctcggtggcttgtgcttgtaatcccagccacttggaagggtgaggcagaattgcttgaacctgggaggcagtggttgcagtgagctgagatggtgccactgcactcctgtctgggagacagagggaggagactccatcaacactaataataataaagtaaataaaagggcactaaccctactcaggaagccttcactctmatgacataattacctcccaaagtccgcacttcctaatgttaccactctggaggttagaatttcaacatataaattttggggggasacattcagaycacaataatgttttataatgttcmttttgctttaacaagagacacatgtcagatagtagacatgatctgagaagacacaaaacccagcgtggtgattttggcagccttgccatgcatctctaacatgcacrtggccagaaaaatagcttggacattctgttcaaccctccacatsaactggtcagtttagtctttaaaaggtgataggcctgttgtsgtggctcacgcctgtaatcccagcactttgggaggctgaggcaggtggatcacttgagccccggagttgaagaccagcctgggcaacacggtgaaactaagaatagaaaatattaggtgggcgtggtggcgtgcacctgtggcctcagctacttaggaggctgaggtggaaggatcacttgagcccaggaggcagaggttgcagtgagccgacattgcaccactgcaccccagcctgggccacacagagaaaccttgtatccaaaaaaaaaaaaaaaaagtgaccacactgtggctttgctgctttgcctaagtatttcgtgaaattgatcgttcattcacaatgctcagtgcagtgactttgccgagcacaagtggtggacttaagaagccacataaagaagcacccacgtctttctctgaggacgtgcttgtgtgtgttctgaggaaagcaggtgatgatccctgaggtgtatcccccaatcccaaactagaagtgagtccccctgctcctcaagcttgcatggcgctcaggtattccagtgggccccgctgcattcttcccagtcccaggaaatctttgtgcatggctgtcttttctgtgccatcttgggcatctcacgcattggccctatmcacatgttgcctccagcatcccaggaactccgttaatgtttatttgaatgatggaatgaaggtgtcttgctatattttgacatttctgtcaaaatatgaatctrtctttgcctagcatcttttcatgtgcacattgcccatctttataacaaagtgtgagtgggaaaggacttttaatcttcattatattatcattcatatgaataatgttaacaattagtgtttattgagcacctgctatgagccagatgtagtgttcagtgctattcatgtgttcttgaattaaattttcatggcaagcctaagaggccatgactgtccacattttgcctctgagagacgcaaggcttggaggcaggaaatsactcactgaaggccacagcacaaagtggggacttgagtcccgatctcactgattctaaagtccttgctctccaacctctgtccatctgaaatggaaaagcactgacgcagttctcactctggagcttgttttattttgcttgggctgctgtagaaataccacaggtcaggtggcttaaacaacaggaatgtagttcctcacagttctggaggttgggagtcctagatcaaggtgtcagcagggttggtttctctctgtaccattgtccctggcttggagatgaycatcttctctgtcttcacatggtcttccctctgtgtgcgtttgcatccttatggcctcttcttgtgagggcactggtcatattggattagggtccaccatataatgactttattttacctgaactgtctcttaaaaggctctgtctccaaacacagtcacattgtgaggtactgggggtttgggcttccacatacaaagtctgggacacagtacgytctcataagagacctcttctcaacaggatccatgtttgatccgggggaataaagctagagttgctttcttccttgtaatatgtataatgactcatgagagaattcyccactgtcttccccacctgagacctgagaggaggagaaggaagcttggagtcgctgccctgtggcctgaattggtcagtgaccaatcactcagacccagctgacaggctatacgcggacaccttggatgtgcccagcatggatcttctccaagtaggaggccttggagtcagagaaaggtgcaactcccactgctgctgcaagaacaaagactttaagatactgaaatttctgggcaaagtttcctcaactcttcatttaagtgttaggccaggtggggtggctcatgtctgtaattccagcactttgggaggctgaggtgggaggatcactggaggtcgggaatttgaaaccagcctggccaacgtggcaaaaccccatttctactaaaaaaaaaatatatatatatatatatatatatatatatatatatatatatatatatatatatatatatatatatatatatgtagccatgcatgggggcctgcccttgtagtcccagctacttgggaggctgagacatgagaatcgcttgaacctgggagtcggaggttgcagtaagctgagatcgccactgcactccagcctgggcaacagtagcaagacgccatctcaaaaaaaaaaaaaaaaaagtgtaatgcaagtagaaaagggcacacactccaggtgtatatctcaacaaatttgtacacactgcatgcacatgggtgacccgcacccacatgttatacacagaataattacaggaccctgccaacctcctcctatcccctttcagctcctgctgtgatgccacttctaatctcaattttattatacaatttgttaaatacagaagtaaatggaggcaatagtgatagtaaaaagaaccatgtgaactgggcgtggtggctcatgtctgtaaagccagcacttcgggagtccaaggtaggagggtcacttgagcccagsaattggagaccagcctgggcaacatcatgagaccccatctgtatccaaataaaagcaacaaaaaaatgagacatgggggtgcatgtctgtggtcccagctactcaggaggctgaggcaggagaatcacttgagcaaaggaggttgaaccatgattgcaccgttgtactccatctagcctgggcgacagagtgagaacctgtctccaaaataaataaataaataaataaaaataaaagtaacagaaccataggccttatctttatctgagttcctgtagcatgtgcactactcctgattaaccaagtgaaagagaaaatgagactaatctctaacctcagcttccttttctgccaaatggaagatcatctctaattaataatgagttagaatacctaggacagtatttggcacacagttgatgaggatggtgtacctagtagctaatggtgagtaggatgaataataatactataccttttggtttctgaaatgagaaatctaaggaactggcttaaccaagaagcagcaagctgttttaattgtgctgttaggagggctgtttgttaaggtacagaagaggattggcccatggctttctgctaagaacctgctgaatgtctgtatagaatccctgcattgtgcctcctatcaatcaggtgcttaggtttgacaagtttcctccaacagactcgtgtagaagtttctgtatcaactggaaaaaaccatggtgcttgggacattcaaggccgaaacttggtccctggatgggagaagatagctgtatcattggcagaggtgccttggtcatgtaccctctccagactagacactagatagtgggtagggtgggacagttttatgtcctctgccaccttatctgggactcttgtcccctgagaagtttgaaaatttggcacattttagtatttgtcagtgtacttcctgcttcttgatgcacttgtactgcacaagaattgattttcaggaaatatggtttttttttcctttttgcacagcgatgggttagcaaaatgcatatttgcatagaaataatctttagtgagctctgctggcaagtgtgtcaaatttataaatatcactactataaagacatacttttggatatggatttcttcctcagtttatttcttctttsattttttcatgtccaggtcactacgtattgcgtatatttggttggaattttatttttgagcaattcatttacccagattgtgtttctggagattaaagcatctcactgtatttttatttttttctacattgcaatttcaaaataatccaactcaaaggctgttgaaaggctccttctgtttaaggtaaagcctgtggcagcctttaacttcctttctcttctcctgctgccaccttggtccacaatttatctttgaaaatgctgggttttaatgggcagggtatagtgcagaaaccagatggttttaactcacacctgtgaaaatgctggggatctgcgaaacattaaagttaatggccagaataaggctgccaagctcggtggaattgtacttaactggcatatcattctggttaactgaactttccattaactcacagatctatcttttcatgcccccttctaaccccctactcaccacccacccagttcctcctagtgggcagtttgctgctgctgtcttacctcctcatcctcacccctttcacctctcccctggtaactgatttatttttccctcttggagktgcttattcttttcttcttccagttgcatctctccctctacttagatacacatttccattttacttctatttggtagtctcagaacttggcttttattggccagtatattcaatgattcacttgcacctttaaccttgtgttgttctaatctttttttttttttttttttttttttttttttttgagacagagtcttgctctgttgtctaggctggagtgcagtggcaccatctcggctcaccacgagctctgcgtcgtgggttcatgccattctcctgcctcagcctgcggagtagctgggactacaggcactcaccaccatgcctggctaattttttgtattttttagtaaagatggggtttcaccatgttagccaggatggtctcgatctcctgacctcatgatctgcctaccttagcctcccaaagtgctgggattacaggcgtgagccaccgtgcccagccttcttgttttaatcttttagacaactggacacaggtttgtctttgaaattgtcctggtttttcttgatgttttagtgctcctggatgtccaatgtcattcttgggctagttgaargaaagttttggctacccagttgttagctgctgaagtttaactgtgcattctaagcacaccagtattttattacatcatacctgggcagcagatarttttagtaaaaccttgaaaagatatgactattgggaagaaatttgggattctatcctttttctctccattcttctctcctgcaccaagtttctaagctcgtgattaaataaattctgaccctactctgataaaagtgaacccttgtggctggtcgcagtggctcatgcttgtaatcccagcactttgggacgccgaggcaggcagatcacctgaggtcaggagtttgagaccagcctggccaacatggtaaaaccccacctctactaaaaatacaaaattagtcaggcgtggtagtgtacacccataatcccaggtacacaggaggctgagacataagaatcgcttgaacccaggagacgggggttgcagggagctgagatcgtgccactgtactccagcctgggtgacaagagtgaaactccatcttaaaaaaaaaaaaagtgaacccttgtagtttcttcctctgtttgacagayggaccctaagacggccccagtgataccccacctcctggtgtccaaggcctgatgtgatcacccttcccccaccttgaatgtaggtgggacatgggacttacttctgaccaatagaatatgaaaaagataataggatgtaactgtttagattcggttacactatatggcaaagcaaagggattttggaaataccattaaggtcttacatgagacagattttgagttaatgagcagggggatcctcctgggtgggcctgacttagtaaggggaaaatcccttaaagaggagctaaaataagagagtctctctctccattgctggctttgaaaaagtaagctgccttgcagtaaggaactgcatttggcttctaggagctgagagtgccctaaggaagccagcaagaaaatgaggacattagtcctataaccacaaggaaatgagttctgctagcaacctaagggagcttgaaggtgattgaccatccccagtcaagcctctgatgagaccgcagccccactaggcaactagatttcagcatggtaagaccctggatggagaacccagctcagccatgcccagactcctatcctatggaagctttaagataataaatgtatgtggctttaagctgttaagcttttggtaatttgttagatggcaacagaaaatgtgtacaccctggatagtagacagagactgcatctttctttggcatttggctgcacagcaagttctaagttactcaccaggtttcagaggagagatgggaatttgatgatcttataagaaacctgtactctttggccagacacggtggctcatgcctgtcattccagcactttgggagaccaaggcgggcagatcacctgaggtcatgagttcgagaccagcctgggcaacatgctgaaaccccatctctactaaaaatacaaaaatcagccaggcatggtggcgcatgcttgtagtcccagcgacttgagaggctgagggatgagaatcacttgaacccgagaggcaggggttrcagtgagtgcggtggcagctgggacattaaccaagttgtgaaaggagccatgatgttattagctgagtyatgtcactgcacctccagcctgggcaacagagtcagactctgtctcaaaaaaaaaaaaaagtgtactttttgaggaaagttctatttttcattattttccactatgaatgaagaagaaaataatatacatacattactkggattcatacggacattatttagacacacttccacctacagagtcacatattgtatagaataaaatatcatcaggagcagctcatgtgaccagaatgtgrcaaagtctttgctctacaggtcaagttgggacttactgaggagaaatgaggggactkcaaagtccaggttgcaccatccactttatagatgaggaaagtaagaacccacagcatcttgcacgtagaattcaatatatgtcctgcttcttgaatcacattgacctaacaggtcatatgatttccatttgtttgcacaacaactcaagggcaaaagtgaaattggaatttttgcttttgaatttctgaaaccttgttttatttatttattttctaatcttttttttttttttttcgtggaatcatgttcccttcggaaaactccctgggtgccccagcattatgtggtaaaggacatgtatttccaactggcaggggctctgcaaagtttctctgcctcctttgctmaccaaaccctaaataattgtctggatgttccttttattgtcacctctgaaacaagacgaagatttggacggtttgctttagagtgcattaacttctttatcacattaatactgactcatatcttatttcccacttgcaataagaaaaccattcaaatcttkccctcacaggacaatatctttaatagcttctgtgtgtttcctatttttggctgtttctgtataaacagactaatctaatagcatactgaacccatctaacttggcagaaattcagaaaatcactcatttctatggcaagctgagatgctgagaagggggaaaaaaccctcacttttattgcagcaagatttttctcaaagttgcctttcatgaacataatatgtctatcatttggaattctccagcaccctggctggaaattatttattgcagaacgacacaatggtgaacgagaaggtattattccctgtacgatttctggcttgaatttgtttgcctaaaggagcagatatcgtatgaacatgattttgaatgctggcatggtgatgaaaggtgatgttcacctggagtctgtacacacaaaaccctgttcattttacctaaagggtaagaacatcatggcccccttcatatcctggttaatgtccccgctgaccctgagttctgcctccatcactggaacaagagcctgtctttgggaagaggtgtsttccctggcactcgtttgatttgtagccgccacacatggcaggtcccaagctgtctgaagtcttggctgccattcctaagctactaaaactttgctggagaacatcaccaatcacgctgagggatcctttgacaactcagcttcatgaggacagctgcagttctgcgtttaggctggggtcaccggggtcgctgccccagccccactctttagcctcagtccctctgtggttcccctgactgagctcctcactaaaggggaggaatccctggagcctccccatccaaggccagcgtgttccatttgagggtaactggatccctgaaattcacccccacacaatccacaacctactactagaatgccatatgcttttctatatgctgttgtttaatttcagttggtacatattttattttttgaaacagacttcgttagaacatctttagatttaaagaaaaatcaagactgtagtaccaagttcccatgtgtgtaacagccagtttatcctattattttaacgtcttatgttatttggtacatttattaagattaaattattgatactgaaatattaggttgtgcaaaagcaattgtggtttttgccattaaaagtaatagtaataataatactcggttggtgcaaaagtaaatgtgttttttgctattaaaagtaatgcggttttacttctgcagtttttttgccatttgccaattacttttgcagtttttgccagtacttaaaagtaatggcaaaaactgcaaaagtaattggcaaatggcaattgcggtttttgccgttacttaaaattgcattacttaaaagtttttaagtaatgcaattacttaaaacttaagtttttaagtaagtttaagtaaaatttgcattacttaaaagtaatcgcagtttttgccattacttaaaagtaatggcaccaacctaatattgttattactttttaccaacctaatattgttattaactaaagtccatcgtttatcatattgccttaggtttttaaaaaattttttacctaatgacttttttgtgttccaggagcccatccaggataccacttttatttattttttttttctttttgagatggagtctggctcttttgcccaggatggagtgcagtggcgcgatcttggctcactgcaacctccgcctcgcaggtttaagtgattctcctgcctcagcctcctgagcaggtgggaccacaggcatgcgccaccacgctcagctaatttttgcaggataccacattttatttaattgtcaggtctccttagcatcttcttggctgtgacagtttctcagaattgtctttgtgatgaccttgacagctttgaggagtgctggttgggtattctgtaggatgcycctgtgttgggatttttatgatgtttttctcatgagtttactggagttaatgaatttcagggaggaagaccccagaggtctgttttcatcacatcgtatcaagcattccaccttcatcatgactcttcactgttgatggtgactctgattcacctggtcaaggtagtgttcrttaggtttctccactgcacacttagtctttccctctactttccacactgctgcctttggaggagtgttgctgtgcccagctcaygcttgtggagtggggatttaatgttctcactcttcgagggtagagtatctgcataaactacttggaattctacatggaatatttgtgtcttctcccccatttatttatttaatcatttatttatatcacggtacactcatggacatttattttatgctttatgttataatcctatactactttrtttattttgttgcttaaatttttccagatggaacaatttggtcttcaaaagttgctgctgttggctcctgtgttcttgtgatgtacacacatcatggtgtggtgtgtttttatctttggttttgttttcacttcttttttgctttttgtgcctcctcttccctcttccccccacctcatacatacacaaagggcagcatgctactataatttctggaatctcagccatattcttcttttttttgttttaaataaaaatcatactagagcagtaggcagtgtgggtgagttctcccactttacattttactttgcataatttaggcccctttcaggccactyttccccctgtgccccaggtgtgtttgctaccatacctccccaggggatagccctccaaacytgattggccamctagtctggtcttaaagtcccaaagggaggccatcacaaactactcagtatggagaagacctgaatcctaattttggcttaaccccaaacttgggcgattcagttttacctgtgtcctctctataccatagtttatgacaaggggttttctgtggctggtctccaaggcctcttccaatcttgacattctrtgatcctgtaagtctttgaataatggcccaggatgccaacaagaagtcaccaatgagagttcaggtgttctgttggaaatctttgtaaaatcacagagaaaaggagaagaaaaagaataaagaggaaaaactggacacataaataggaagacaaagaatgaatgtggactggggagagaagagtcattgacagggacaagaaataaataactttgatgcaaatcctgggaagactctggaacaacatggaggcacctatgttaactctatttcattttggaaaagttgastagacaaaaggtgcagagtagagtatgcagtgatttcagggtgttgggctctgacaagatgatgccgacttagacagtgttagtcaacatcaaatgtctggatcaagagaggcaagaatcccgtggatttggcgttggccagaacttgtctggaatcttgttttctgccttsagtgtcacctgttgagagctctgttgacaaactggcatttgtccttgggagagtagcctcaggaccaggggtgaagagttcagtaaactgtgtttaacccaaggaaagatacagggtgtgtcagattttgtaaggattttcaaggagcagtagatagtggccctacagtggaatgaaccttcacaccgaggatctgcttcctttgttggaggtgggaaagcaaaagctggatgcttggaattgtcatggctgccgtctgagtgatgctaccttgagtggacggtttggccaactaaggagtaaggcctctccctcatgtcacattgagtggtgctaatgtttcctgaagtttccctttcttttcagttcagtgtttcagaatctcagccttccagcagaatcccctttgtttgctctaaatatacattcccaagccccgtgtggccattctgatttactaggtctggggttgggggattgtgggtgccgagaatcagtatttctatcaagctcccaaggggacctgatatatacatggagctgaaaagtacccacctaacagacttgccagctccttaaggataagaactatattttcttcctttttttgtatgcctccccatgcaaggataattacacagaataagcactgagatgcctgttgatggatttattccagcaattttwtttttttagctctctttgtctggaactttgcaaaataaacaccatggtcactccgtgctttgtgagtgacgtgctagaatggaatttcactgttttaaattcagggttaatttcttgctttcaaatgaattatgaaaggaagaggagagacctttggaaaagtctgaatgttgatgccgacgactagccaggcgcttcccttccagctggtttcgtgagggattaagaggccactgttgtgaatctcccattagtgatggtcccaggccccctcctcattgtgcatttatcttacaagaggcatatttaggagatgtttccgttctattttatctgcagaattactttccattctcaggtcttttatataagtattcccttgaacccgttccaaaaactggatttttaacccaatagaccataactgcagtgttttattgtgcttacatatttcaaaatgtgaatgtaagtagatttagcaaagttaaaataaaatgaaaacttttcaaagggcaccactgctcgcattcccatgttggagttttccctttggggttcttatgccattttaaagactctgaaaacaggaagactttttctcttgggtattttwwtttttttttcctctgcaagggatggggtcataagacattggtgaggttaggccttcctttgtctcccaggagcacacttgatagcaatgtagggtgaattccaaatctgtgagttagtgccatatatagcagtgttgtcagtaagatttctcactggcatctctgcttcccctcttgactctcttgaaatcccttcttcaggcagaagttggagtcatttctctaaaatagaaatctgatcttgccaccaccctacttgccactccctgcttaatcccttcactggctcaccatatcccttaggataaaataacaaaatcctttccagggcctgcaagacccctgccaacctctgcagcttactttgtaccactttccccagaaacctgctacctaccctgctccttgccacagggcctttgcacaggctcttgtctctggctagagtagtcttcccatcctgctttagctaatcaactctttctcatcatttaggcttcaaatggatcatcactttctctggggtgcaggggtctttcatataagtatttctttgaactcattccaaaaaagtggatttttagaaatagaaaaaactaatttagaaatagaaaattaattgagttttagtttttagaaaattatctaagaagtagatttttagaaatagaaaattaacgtagatcacagaaaattatccaaastcagttaattttcccttttccagcaactgtatttgtcctccccacttctcttccctgccttctttttttctccttagcacttacaatgtctcactcatgtagactcgaagcttcacaagggcagggattttagtctatttcattgaaaatctgtcaccagtcactggcccagagagagtcctcaaaaataattgttgaatgaatgaatgaatgaatgaatgatgatggcgtgatgattgtgtattcctcatctggctgtaagtttcacaaggccaggcactggggtcctattttgctcactgttgctgtgtgggaaagagttagtacagcagactgtcgcaagcttggctcttggctgcatctgggaacttggaatttaggagggctgtcaccattcccagatcagataaagatggctcactctgtctagactgcttgtaccaaaaatagggctcatgtggaatacctgctttcctttgtggaggctggaattttgttatatgctacagagagggtgcctacgtggccaacttccaataaaaactgtggacactgagtccctaatacatttctctggtagacaatacttcatatatattttcacagctcatttctgggggactaattaaatgcatcctgtgtgaccccactggaagaggacatttggaatcttgtacctggttttctccagacttcgcctcattcascatttccctgtgctcattttgccttgcatccttttgctgtgataaatctcagccatgagtgtgaccgtatgctgagtcttatgagtcttccttgcaaaccaccaaacctgggttggcgtttcagtgcctgacacagttgtattcctaagacatagttgggaccagacctcaagaaaatagccaacaaatactggstgaatgaacgaaagasgccataygcagtcagcccccctctctctgggttctacatatgtagatttaactaatgacagattaaaagcattcgaacaaacggagggtggtatctgtactgaaaatgtaccaactgcttttttttgtcattattccttaaacaatccaacataaccactatttatatcgtgtttatattgtattaggtattataagtaatctagagatgatttaaagtgtacaggagcrtcacatacattatatgcaaatactatacaattttatgttagggacttgagcatttgtggattttggtatttgggggggttccttgaaccagtcccctttggatactgagggacaactgtacaaatcacatttaggagtggatgcaggtcagtcgtgacatctcatccaccccttcctcacccaagattctccgtggcttgtgtcaaggcctcaccacatcagaatatttctgctcatggttgctgagacagagctggacaggtccagcatccattccccaaaacagaactcaaactgacgatcatcaagatattccagctatggcaaactgcggaagaattaggacagatgtatgacttatttcatataaagctaaatcagtttaatttatatgattgtcctttattctgagattatgttcaacagatattttcagtgttaaaatattcttttttttttttttttttgagacagggtctggctctgtcacccagggtctagcacagtggcacgattttggctcactgcagcttcctcctcccaggctcaagagatattcttgcctcagccctccaagtagggctacacgtgtgtgccaccgtgcctggctattttttgtagggacagggtttcaacatgttgccaaggctagtctctaactcctgggctcaagcaatctgctcacctgggtctcccaaagtgttgggattataggtgtgaaccaccatacccagccaaaatattcttttcaaagtgatwagaagtaggagaagcttgctctctttttattggcacttctgtcttacatgcactttttgattkaaattattctgkcttctatgaaatgacagtgattggaggtggtttatttttttttaagtctgcttactcggaaaaataaaacaaagttgacaacctgatttcagacctcccaattttttsttaaaaaaaataaaagtcttcttggtccatgaaatccagaaactggagaccaaactagcaaattcgcaaggagctgcttgatagaaaaacacttgagatcaagagtcagaaatagctgggttgaattccagttctctcatattaagtgacaagttgcagaatgcccctgtctttctgagctgtttttatatctgtacaatggggttaatactactagtatttgmttccagggattgttttggaggggagtgaggaataaatgatataattcactaaaacacgtagaatagtatttgacacagagtaggtcagcatgcccaaagtatcagagtcattattgagttattccgctacctccgtatttgagtcctttcttttgggctttcctacttaacgtcgcagatgttatttttttgaagagggtgtaggccaagaaaggggtgggagaaacgagcaaggtgttgatagaaccccttagtgtcctcctcataccacagacactctcttcccccacttacttggccawttttttttttttttttttttttttttggkggagtctcgttctgtctcccaggctggagtgcaatggtgcgatctcagctccctgcaacctctgcctcccatattcaagggattctcctgcctcagcctctcgaatagctgggattacaggtgtgcgccaccacgcccagctgattttgtatttttagtagagttgggatttctccatgttggtcagactggtctcgaactcctgacctcaggtgatccacccgcctcagcctcccacagtgctggggttgcagctgtgagccactgcgcccggcctacttggccaaattcttgcctgatcgcctctccacccctgctacgtgtaatagaaaggtagggccatgttggagagggatccaacatttattatccccattttacagatgaagaasttaaggtggccaggcatggtggctcatgcctgtaatcctagcacttygggacactgaggtgggtggatcacttgaggtcaggagtttgagagcaatctggccaacatggtgaaaccctgtctctactacaaataaaaaattagccgggtgtggtggcgtgtgcctgtaatcccagttactcsggaggctgaggcaggagaatcgcttgagcctgggaggcagaggttgcagtgagctgagatcgygccactgcgctccatgctaggtgacagagcaagattccatctcaaaacaaaacaaaacaaaaaaacaagaagttaaggattgcagagcataagtatcttctatggggctacccaactaggtcgggacagggcagggatttgaacctaggagctcttggattgcaatttttcattcacccctccctctccacccttcctgtcttcaagcctgagcaggtgatactgcattttgtaccgtatgactttwaaacagaaccacgagttcagaactttggttaggtcctgcccgtgttctctagctaacgcatggcaacgctggtttccaacctttcactgtgcgggtttctgatgagtacgctggcaggcctctggcttcagagatgccactacaaaggtctcctccttttcataaacattgctgcaaggcccgcttctcaagaaagcaacttgtgctacctcctgcgtgcttttatgcttcgctgtgaagtgcaaagttgggctggcaggcctggctttcttctccgacttatgtatgattcatcaagaggactccaggctgtggtgtgcggtgcaacccgggctgtgttcccgagtgcatcaaacggggattgggacctgktttccttcccactcacatgtaggtcacctacgggagcargggaggaaccatctgaggtgtttttttttttttttttagatttctcattgctgagaacagttccagctctgcygaccaaaggctgagtgtccytttattagtctgagcccctagagaraccaaagaggcaaccctcgagccaactgacagccagctgtggggttggaccctgtttttcatacagtgagcactcttgaacccagagaaggtgcaggttggagatgcagctatatgactctgtaccagagagagacctttttgtacatttggaataaaaatttttagcattagagattcgcttttttgtgtctaaatacaaatgtccaggagaataggaatgccatagtggtgagctaagagcaggcagttagttaagtgtatgacaagtatctcattataaatggatgctgaaatgtccaagtgtggaaatgataygcttcagctcttatttttaagtcatccttatctctttcacttattccctcattcaggcaccaaaaatgctgtttgactgggagagcaagtggagctgttcaaagttstagggacagccgggcgcagtggctcatgcctgtaatcccagcactttgggagggcgaggcgggcagatcacaaggtcaggagttcgagaccagcctggccaacatggtgaaaccccgtctctactaaaaatacaaaaattagctgggcatggtggcgggcgcctgtaatcccagctattcaggaagttgaggcaggagaatcatttgaacccaggaggcggaggttgcagtgagccaagattgcgccactgcactccagcctgggtgacagagcaagactctgtgttwaaaaaaaaaaaaaaaaaagttctaaatcagtggattctgccgataaacatcatctggacggaatgaagctgagggccaatagtttagaggctcagcacccgactggagagagagagagagagagagagagagwgwgwatgtgtgtgtgtgtgtgtgtgtgtgtgtgcgcgtgcatgtgtatacgctggtgtttaggtgggcttgagaaaagtgctgactttgtgaacgaggaggagggaaagggtccagagcagtaaagagcctgtaaataaattcataccagcttcagccccatgctttcgtttgggattcctcatccaaccctgacggcttccctgcgggacatatttccccctcttacagataggaaaccttgcccaatgtgattacgccaggaagtcagatttcaaatctaaatgtgcctaatgccaaaactgtacctcttgccactcaacatctgcagtcaaaggcttcctgactcaggatttgctggggtctggctctgggctattagaattagatgcgtgagaccctttcaatctaaaccttaagtattttgcctgttggacagatgcctggttgtccctttaatccatcgcccaaaaagcctgaggaaggatggcaggtggacttggatctaggccactcccttagatcctgattaggggacctctgcgactgctcatctgggaggaactaggggagcgctaatgtgttgtccttgactgggcaagaagggaaggagaattgtgaaacatgcacaattagaagtcgtgcacctgggttcatatcctggctgggccacttactttctggcgggtggggarggcagacaagttgctcatcctctctgcgcctcagtttcttcatctacaaaatgaagatgttggttatttctttattcaagggttgttgaraggatgaagtgctaaaaatgcttgaccagcattcacacaggcactaagacggtgagtactcactacttakcgctgtcaacatcatctccgtccacatcaatgtcgtcatcgtccttatgaaaagccckgggcatcattttgcccttgagctggatgtccatgttggaaaaacagctagtgraaggcgtgcccaaatctcagaagttggcgtttccttgcagatatcattggtggccattggaggggaaaaagatgctttggaaaccaggacacagagaaaagtgcctcgtattatacagagccaagagaggtcactgtggaagtacagaggaagccttggcctaattgcacggttaatacaattccgtaactcatcctgccaacacgaaggtagatggacggtccttatgctcgctgcggaacactgcctgtgttttcctaggagagacatctgcactctagtagtgattaaaatgcctttgacaggctcttgctattaagagtttctggctccagtttaataaaaggtagtatattataatggaaaccaggttattattgataaggactagacatattagagaccaggttaaagctttgatagtcccaaatgcaaggggagggagctaagggttattgcaaacctactgtgtgtcaattgctctaccagacacctcagagacatcacagccaaagacccccacctttgaataaaccaagtttggcctctctgatatattaatatatttaatcatcagactttcagtgttaaaggagattacagtagaggcatccagttgattggggaatagttgttgcaaatgataagctcttttgaataaactgatactgacttaatgaggttctgctgtgtactatcttttttttcctaatagaaaatagagtagctgccctccccatccgccattctcagtccttttgcttactagtaatgaccctcttttctctcactccatgggaacttttaaaactgataattaatggatttttagcctcaagtttctggaattctaagagggcctgaaaggtaagtgctcacttactgaggtgtgtgaacaaaaacaggcaacctagctcagcaagtaagaatggagtggcatctccccacctgctctggagtcatgtgtttgcttctggaagggaggcaagaggcattcaacctcctgttaatttggttgctccttcagatacgctcttcatggtacagccctgasctgcatcatttaaagaccaattgttaaggaccaatctgagggcctgtgcattagttaaaactccttatctggtcatagagggtggtgtggtttggacgcgttccccttgtctgtgcaattcccaacagaggcaagtgcgcatttgagacaggttgagggttcaagctgtccaatccctgctcatctgcagcacaccaaggaatgtggactaatgaaaaataaactgcatgcatgcartgcccatcacactgcctgcattttctaatcttcacaataactctgtgttgagaaatattcctgtctgtaatcccggcactttgggaggctgaagcgggcagatcacctgaggtcaggagtttgagaccagcctggscaacatggtgaactccccccaaccaacgacccttcccatatctactaaaaatacaaaaattagctgggcatggtggtggggacctataatcccagctacttggaggctgatgcagcagagtctgttgaacccaggaggcagaggttgcagtgagccaagacagtgccactgtgttccagcctgggcaacaagagtgaaactctgtctcaaaaaaaaaaaaaaattgtttctggccccacgttacagatgaggcttttaaagatacccagccaatggtccacagtgatgtaactcatcagtggtccacctgacattggaaattcggttgctttggaaccttctactacatcccctttccttactcactgacatcattcccagatcaaagaaagataaaagaaggaagggctggagacgttgttttcctgtatgctccttgatgaagggctcagagctaagcgcggagtaggtgcttaagcccttccatttgaaaggagctttaaacacctttggtggcagctaagagtgtcaaaatggagggatgtgtaggggacctagggcctgggtaacattgtcccagsccagggcctattgtgttgtgtgtgtctccactttccagcctttgggaacgcagagggggacctctgtaattggtaccagcatcccttccttgcagggtccgtccttcctctgagttgggggaaggggtctccatggtttcttctaccaggtagacccagaatcactttcaacttgctcacctgtctgtgcagtgtttgagttcttccctgggaagcttgctcacatcatccacttctctctgggttctccgtaccgctttccccaatccaagctaagctcttctcttagttattctaataactgcccaatatcaggcactaccctcaacactgtttcccatggcaattattttacatgacagtttaaaaaacaggaatgctcgatttgtattcccattttgcagacaagccaacgaaggcttggaggggttgaatggcccaagtttcctaagtggccaggggcagagtcaggatctgaacccaagacataggcccaggagtctgtgtttgttctttaaacctctctattcagttgcccagctcttttcattccctgtcctttccccctctggctgggtctgcctttccaaccgctaccaccttccaccaccattttttttttgttkcctctgcaagcaacatctgaaaggcccagacccagcttgttggccttgggctctgataagatctgtctgcactccttttgtctggcctgtacctgccttttctgaatgaccctgttaattgcaattgactctcatagaatgtggatagcagtgccasttgacaccagactaatgcttctgacttttccatggtgccccagcagcaggctggagggaagggcgggggcggtcagaggagagatagagcacttcagattccamtcgaatacattagagcattagagcttttctcttcctcagggtgctctctctctctgggttgggaggagatgtggcatttctaggaattcacagtaaaatcagaaataattaggagatttcacagttgtagctcctgtgaagattcaggaattttttttttcttctatttgcaagctttagtcctaggcatggaaaaagaactttgaagaaaacctgagagatatsagtgtaaaacaagagaatgattccctctggggtgctggtagtgggggcttaatttcctaaaggcttactgggtatcagggctgctttcctttataatcttttacccgtcttatgggggatgaacagaaacacactttagtgctagaaaagctgggccyaaaagaccagtctcctgtcccatacttggacatttattgttctttttgggcaaggtgaaaacttgaaaccaaaagtctgttgagtttggaagacttgactcccaggatgtacaaagtacttctgcatgtgcgcaaagtcctgtaggcccaggcatcaatgacacatgcagtgtgggcccaggcatcgatgacacacgcagggaagcaacccaagctgggtcagtccttacaaggagaccggcacctgggctcacaccttgccgtatatgacttcatgggaacctcataacagacctgtgggctcagaattattctctcactttgcagatgaggaaatggaagtgcacagaaggaaagtaagagtgtttgagatcctgtagtgggttcattgctgagaataaacccggagttgcctctgggaggacctggtggtgggtgggatggagagagaggcctcccctcagactccaggggcacagattggattttttttttttccagacagagtttcactcttgttgcacaggctggggtgcaatggtatgatcttggctcactgcaacctctgcctcccaggttcgagtgattttcctgcctcagcctctggagtagctgggattacaggtgcccgccaccacgcccagctaattttttgtcttttttagtagagacagggtttcaccatgttggccaggctggtcttgaactcctgacctcaggtgatccacctgccccagcctcccacagtgttgggatcacaggtgtgagccaccatgctaggcccagattggcttctgtgtgaggatgaagagtaataggaagatagagtggtgatctaatgtcaactgtggagggagtgggaggcaggtgttcgcagggcacagctggtttcctttttgaatcccacccagtgctgggggcaagtttcataagcctgtgaccacccagataggaaagtacacagcaacaccaggcagattcattttctttaaatgaggggttcaaaatagaaacacaaagcattgagtattgagaagaaatggatcttcaggtttggagggaggccgatagagagtgtctggagttgccaacgtcctctccttgggtcatgggtgtgtgtgtgtgtgttttcttcttgktgktgggtttttttttttttttttttttttttttggcttttgcgcctatggtgacttttagcgaatggatactattgaaggaatgtttcacttccaaatccagatctctgacttcccttgaaaatttggagtgccactcaagtcggccgctctgagctagaatcctggtgttcaraattggcaggaagggcacaggggcaaggtataggctcacgtctccacattctgcacctcccaggctcctgccattgatgtgagcgggttcctgtactgyatgaagcaggggtttgcatccgaaacaaccacccgtgctgaatatgtaggtgatacgttgatctgtacagcaaaccaccatggcacacatttacctatgtaacaaacctacacatcctgcacattgtaccctggaacttaaaagttggtgaaaraaagaaggggccgggcatggtggctcacgcctgtaatcctaacattttgggaggtcgaggcaggcarattgcytgagctcaggagttgaataccagcctgggcaacacggtgaaaccccgactctactaaaatacaaaaaattagccgggcgtggcagtgtgtgcctgtaatcccagctattcgggagggtgaggcaggggaattgcttgaacctgggaagcagaggttgcagtgagccgagatcatgccactgcactccagtctgggtgacagcgcgagattctgtcttcaaaaaaaaaaaaaaagaagaagaaaagaaaggaaggacagatggaaggaaggaaaagggaagggaaaggaaaggaaccagctgcaaaaattgtcctaactgagcattactgtaacatagaacagctgaaacactcctcaaagctgagaggagggtttgggagagaagcaggctgtggttgtgaacaggtgcctcctccaaaaaaattctcttccttggatttcaaaatgacccccgttgacaacaaagcctttcacgctgtgtttattttttttcaggtctaagtttcccccaggagattttttttttctaaaggaaaaggcagagaagcccccagaccggagccacaatcaaatgcaaatatgacaataggacccatcctggagagaaaaagccttctttttaattagaagcctggaaggacataccctttaattgctgcacttgtagtgtcagggttatcaatatccgtggctctttcattaataaactggcgagtcagaaagcagcaggagtgggaacctctccccacccaatcccctctcacgccccaagctctatttaatcaactgcagactcaatcaaatggggaaaagaacatgtaaatcagctcattcattctgctggccctaaataggtagaaggaagggaaacatgaaagggagccttcatctgttttcctgcagatgcccggctygtggttaacccaagcaagaggtagttaaacggccccgcagattgccagtgactccgggaatgcctargtttatgtatggattaacacagtgatagaccctgagtagcaaaagacgaagactaattacctgacagarctcccctccactcgcctgggtcattgaaattaatttctgctttcaagcttggcagaaagcagctgcagaatttcagttcaatacttaaattaacggggagccgaaattatttctgtgcacaggcagtattagaggagtggcttaccaaatagatcttgatcgcagacacggaaaaaaggattattcctccccttttatcaagagccgtaagtccttggaaaatgcaaagagggggaaaaagaagaaaaacagcaacgarkttattggagagttaamacttaaakactccagtacattgagtgtgacatgcctgtgtaggagactgtctgtcccccaaataattgacaatttctctccatctaacaagaaaatatatggcacttttatatatacttgaattggaatccctaatccagagataatttgtgaatatccattctatagcatcccatgttgtcaagaaggtgttgacttactgcaaggttaaggaaatgggtggagaatgtagggaggaggtggaggataaaggataggactaggaatcagagttgggatttgaacccagggcttctgtctccagattccttgttctgtccctttatgctgactttccttttttgctcaaagtctctctccttgcttctttctctttgggctccctgcttttatttcggccctgatggaatctgtcgactttactgagctccatgtatgtgcaccaggtcagattcaatgctgcctaggtccacagtcctcagttatttgttcctgtgattttcgcgccaccaggagccacttgttggatgagatttccgggcaagttgagtctccatgtttttgtcgtgggctactgccagctgagatatggatgaagactccctttcatgtttcccttctttggtgtccatggcagttcccacctcgaccgctatggtatttcttttgcttctgctgaggctgtgtgtgggtgcacatcaggatacctcagtggggaactcagggcgtgaggcacactcatgacagatgcaggaaaaacatctcttttctaactgtccagctctttaggattaggcaatactttaataatcaaccaaattctggaatcctactgccaaattatggcactcatcctacttggtgtaaaatcctgggatgatagcttataatagtaataataagacctgcttcccggtgattmtctaaggattaaatcagttcatggagatgaaatacttaaactgtgcctggcacaaagtaaatgttagtgctactattatccctgctgctgttaaccccaactagataagccaagataaggtgctctccattgtttacctgaacaggcagaaaagctctatgcagctatccagacccaagaggatccgacagctctggaacttgtaatatttgcagcatgtcttgccctcttaatgtctaagaagtcaaaaaaggacacgtatgcctagaaaacrtgaataattatcatctatcaaatttttaccatgtgccaagcatagtcatatttggctaacgaaaacaacaaaatcaaccgtgacaaggttttattagtaatgaaactgaggcttctggaggatctgtaactgttgcaaatttccagtggctagttcagggacagtgccggggcttgaacccctgtctctgtgtctcccagctcataaggtgtgctaccaagtcacccatgwgtagcaattaggcgacttctaacatgtccagctttaaacctgtgacctcaaggcaaatgacttccacatctcattagcactccccagagccttccagccccctgtaggagagggaggttaatcagccacgcgctgaatctgcttataaggctgtttcatgtatgatttttatatcttggctcctaataatggccccgttgtaaatgattgtctcactatgatatacgggttccttaccttctaggaactgatttaaaaggaagccctagacttcttgtgcctgtagagtttattcatatcactctttgcttgctcagcagttgaaatgggatggaggaaagccccctaactccaaaaaaaaaaaaaaaactttcttcccagcctgagacagttgccataattagtaacctgcagctcccttgatatcttgatgatactttattaaaacaaacaaacaacaaaaaacacagctgggtgcggtggctcacgcctgtaatcccagcgctttgggaggccaagatgggcagatcacgtgaggtcaggagtttgagaccagcctgaccaacatggagaaaacctgtgtcttctaaaagtacaaaattagccagacatggtggtgcatgcctgtaatcccagctactcagaaggctgaggcgggagaatcatttgaacctgggaggtggaggttgtggtragctgagatcacgccattgcactccagcctgggcaacgagcgaaactctgtctcaaaaatgaatgaatgaatgaatgaatgaatgaaatactacttctccctgtcctccccaccctaagcatctgatcagacaggtagtgctggtggacagatggacagacacctaccccatatgtcacctccctcctctatgcaaacaaaaattttaattatttctagaatgacttaggagagcaagtcatgtgggatatatagcgtcagggagcgtattttcaaaccaaaaacctgggcccttattttttttttctttttgagacagagttttgctcttattgctcaggctgctgtacagtggggcaaactcagctcactgcaacctccgcctaccaggttcaaatgattttcctgcctcagcctcccaagtacctgggattacaggagcctgccaccacgcctggctaattttttgtacttttagtagagatgrggttgcaccatgtttaccaggctggtctggaactcctgaactcaagtgatctgcccgcctttgcctcccaaagtgctgggattacaggcgtgagccactgtgcccagccaaacctcggcacttttatccaacaaatatttatttcgtgactattatgagtcaggcttaagaatacaytagtaggtacagcaggagagcatgtagaagaggatagatgtagaaaatcgggacggcatgttaggaatatagataggaattactaaggaaaattgtatttttgtggaattctttgaactcgttactattagtaaacggtgagttttggttctactcttcaatgagtttaagatgaaggaaatcattaaatagtgctttcttttcttcaaaagttgggttgcattgcatagttaaagttctttaaattcttctctaaaccccaaggctaagcaatatacaatctagttacaatggtctgcttgctgttaccagaatctrtcaagctctttcctatctaagggttttttccatgtactggtttctctcctgcgtggtcttgttctacccttgaggagggtaccacttcctcattgcttagttgtcagtataaatgctcctttctcagagaggcccatcctgaccatctgtgtttttttcctatcaatgctttaacaaatgaccacccatgggtggcttacataccatgaatgtcttctcttaccattctggaggtcaaaagtccaaaatgggtctgtcttagtccttttgtgttgctataaaggaatgcctgagctgggtcatttacaaaggaaggaaatttatttgtctcatgtttctgcaggatgtccaagaagcatggtgccaatgtatttctgatgagggcgtcaggcagcttctactcatggtggaaagtgaaggggagccagcatgttcagagaacatayagggagaaagggagcaagagaggggaggggaggtgccagagmctttaaaagaaccaactctctgggaacaaatagagggagaacattaatctagccatgagggatccacccccgtaacctagactcctgtcatcagccacggcctccaacattggagatcaaatttcaacatgagatttggaagcaacagacatccaaactatagcagggtctccttgggccaaaatcaaggtgttggcagggctgggctctgggggcttctggggagaatttgttctgactttttcgatttctggaggccacctgtgttccttggctggtggccacatcttccatccttaaaaccagcagtgcagcgtcttcaattctgtccctggctctgctccttctctccccctcctctccccctttgtcatctttttaggtttatttgtgaccttttagatcctttgtgactgcattggtcttccttgggtaactgcgcatactctcctcatgtcaagaacttacatccctctacaaagtcccatctgccatgccaaataacacctttgcaggtttcagggtagagcatggatgccttttgattttgatttggttgtttttggtagagatgatatcttgctctrttgccaggctgatctcggactcctgggctccatcaatcctcttgcttcccaaagtrctgggattataggtgtgagccagtacacttggccttttggcaccattattctgcctgccatcctgtcctaactaaagaaagtaaggtccctccatcctccatcttagcccttctttccttagcctcctaacactcaacgcaatttatatattttaattttttttttgagacaaagtttcactctgtcacccaggctggggtgcagtggcgtgatcttagctcactgcatcccctgtctcccggattcaagcaattctctggcctcagcctctctggtagctggaattacacgtatgtaccactactcccggctaatttttgtctttttagtagagactaggtttcaccatgttggccaagctgatctcaaactcctgacctcaggtgatccgccctactgggcctcccgtagtgataggattacaggccattgtgcctggcgtatatattttaaattttatttttcagtttacttggttttgcctccttctagaactagaacataagctctctgaagtcagggaccatgcctagaatcgccttccttttatytcccatcagccgaaactaactctgctrtgtcrcgctgtgttaggctgtgttggctgtgagtaagagaagtctcacccaactagctgaagcgaggtgggttggaggggggatgccttgtggaagtgacaactctaggcacgtaactggctcagactctgctgggcccagatatacagatgtcatcaagagtctttctcttccttttgagcccagctctccctttgtgacccagcaacttccttccccgatgatggccaagccttgaggatgtgaaactgcccartgccccaatctggartccaccatcctgggtctagctggggacatccttgaatcagcctctgggaatcactgaaccaacatgagtcacttgctactgtgagatctcaraacacatggatcaggacagagggcagggctgtttccccaaggaaatccaaatgctttacaggaaggggagtggatgctggcccggcccaggcgaggatgaggagtaactgagctgcagaccattgtttagccctccttccacctgggagactggctgctggttctcattgcttctgtgggtctccaggtttctatcattacacagattagcacayggttccatgatcatggacccgttcagtacacaatgaaatcatttgcaaagcaccttggggtctgttagagaagggaatggatgtctgaggtatgctaagcctaatctccatcttctcaaagctccactgccactgtcccgtaagggtgggcagattcctccccattctataaaataayagctaccatttcctgagggcatactgagtgctgacaggcacatcaacatcagaccatcaccttcttatacctcaraatagtctgcagggtgactcagaagctcctggctggtaagtggcagatccagagatgaaacccagatctaactggacccaagacagaaatttctagaacagaagccacaaacgtgttagctaagtctggttatgtcaagtggaatatttctggctttgggggatcccagctctttttttctctctcactctgagtatttagaggcttttattgctatttttctaaaaggcaacattagtaatcaactttgccaaaaatttcatatgaayggtgggcttttctttctcatttgctttcgcttagtattttccattattcatttggcttcttgaaccctccctatctgtaccccacacttactcttattcacycagaacaggtgtgtgccaccttggagaagatgaagccagagagaaaatcagtcagacaggaattatgttgaaaggtgamtgaatacattaccacctcccaggagttgaatgaaaaacggctatttctttaggacgtcaaaccacctttttcctctctaattcatgcatatccctatacaaagacccaaggtggtgaggggctggtttttagatagtctggaggccctctgagaatgcgaggcccttgttgtaaggaaacgctggtgggtgctcactccttcatcaggagccagccggctcccctgcacttactgctttggggaagagtttttgtcaagatcatttttgcagatggttgtaaggtaaacagtcactggtccctaggatatcttgctaatgagacaccaaagatacacatggacaatggccagaccatattttgtcacagaatgccgacccacaagctctggagcagtcaactcagaatggtcaggacttggtcagtaatgcccatttttgctaaattttgtccccacttccaacgcaggaycaaccagagaaagccacatatgctccccaaaccaatcatacaggatgtcctggtctagggagcccacctccggcttccccatgtccacagcctccaatcggagcatactggaagtcatccactttcttttttgtttaaccataaagctttctttctctccacctcctttgagcctctgccaaacacaactgatggtggctgactgcctggctgcaggaagttctgaataagtgacctctatttgttattatttgggtyccctttgtttatttttacactagctttgcactaggttaattttttcccacatggcttttcctgtttgtttctttgattgtttttaattaataattagtttgcttatttatttgtttattttttgagagggagtctcgctctgtcacccaggctggagtgcagcagtgtgatcttggctcactgcaaactccacctcccaggttcaagggattctcctgcctcagtctcccaagtagctgagattacaggcscccaccaccaagcccagctaatttttttggttttttttgtattttagtagagacgggatttcaccatgttggccaggctggtctcaaactctggacctcaaatgatccaaccgcctcggacttccaaagtgctgggattacaggcgtgagccaccgtgactgacctgtttttaatttttttagagacagagtttcacactgtttaccagattggagtgcagtggtgcaatcctagcttactgcagcctgtaggtcccgggctcaagcgatcttcccacctctgccacttgaatagstgggactacaggtgggtaccaccatacccagctgttgaaaaaaaaatggtggggtattactctgttgcccaggctggtgttgaactcctggcctcaagcratcctcctgcctcggcctcccaaagtgctgggattacaggcttgagctactkccccaggctcttcccccgtttgttaatacataccatgaccttggcctttcccacctcttaggttttgcttactttcccttctgtcctttacttatgactctgcccccttttgacctctgctaaaattatttgttactgttgttatgttattatttcatgtgttaagtctacagtgtataacttgggtttacttatctcatttaacccttaggaaaaccttacacttaaatactcaaagccttgattttgcaggtctgattgatgggcatacagaggaattaaatgaccttgtcttccacatatggtataaggcacagtagtggaagcaggatccaaatctgtgtctgtgtttggatcaacagccctggccaccatcttgattcatttctcttatctgtaattctatggagggaggttccattgtatatttttttctttcaattacagtattatttgtatattggaagcctattgtactttatctgtgtaactgtcgtagcagctagaggctagtaggactggctgaaatgtcagaggaaggagggaagaaaagggagaaaagcaggacaaatgaacgcagattaaggaaaataaaaaagagtgtttggctaacttgcataaaaaggatctcatttttctttgtaacacattactacatacagtgaccatagtgtttctctaatttcttcaggacktactttgaagatgaagaagtatgtgtatccgctttttgtctttcagaataacatactgctgtctgtaaaaatacagataatttctctcttaaattccataagctggagacactgcccctgtttcaaatgaatacagattcattttgtcacctgtgtgaaattggtgtccrtgtgccttgcttcctaggctgtccaccatgacatcagcctgcccrtgcaatgcttgagatttgccctgtgactcaacccaaatctaaagcccgagtcgtatgaatccaggacacctgcctgcaaatgcatttttcatgtataggttattcactctggtctttgagattatgtaattagcatatgttgtcatagtgatgtatttattataatggaggtgttctcaggaaaccagatttaatacttttaaatcagaggccaacatggacttttaggaattccattcacagtaaattttatgcgtggtgaaaggttatggaatgggtttccatgccatgtctccccctgtcccacaaatctcagctggcctgcaaaggttccactgtggatttttgccagccagccacgctgatgtagacagaatatttcggatttatattattgcttacttggcacatcttccattggaaatggaatagagaaaaggtggcttggctgtttggtttatgtcctaaaaccttatcgkaatgtgattctccttaacagagggattcgtaagcttargamtgataragawttggcttttctgctgttggattgatagctccttgactgctgaagccattgcccatctgttcaactgktgkattcacgaggaggttagacccctgacccaaggcccaggtacctggctttcctcagttgggatcagaaggccacaaagttttcttatattttaagcatcaaagtagcaccactgtacagcatctttacttaatctgccctctttcacgtgtgtgcatccctggcatgcttaaacaagaaaggcaaatgagagagagcgagtgagtgygagcgagagagccctgaggtgccagaaggctgtggttcctttgtgtctacagaaaagatataacgattgaattagactcttaaatatctgtggatgtcaggttgaatacaagcagctattcagtgttttactctggcaggagaacaagtcccctggaggtcagaagccatgcaggtccctggaagtgtgagcagattgttaaaatggtatcaaagatgggctggcatgaggccagagtctatccttgatgctcacctgaggtctagggctaaactcttgcctttacctgttccatgcttagccgttcctgctttttgcctagaacctcagtgctattgctcacacagacccagytcatgtccccaggccatgaccactgcctccccttctcccacctgtgcaggtgttaagcatcagtacataactgaggagtaggagggcagcagcccaaatctttgatgaagaacctctttcgtatcaacttatgctttggaacgagacactgttggatgggaatctggcttctaacaaactgattggttggactcatgccttattctttcggagccttagttttgtcatgtgtagaatggggagtattgctagctattcccatagggagtgagagagagtgtaagtaaaatgcaatggcaggcacagggatggttgccattatcagttacattattatgaggattattttctacctagatcaggtataaggtggatgtattattggcattcctaggactgttttaaaggaagtacctatgaggcctcatgataagccagatgtccagaagccagcttgagaccagggctcctggtcacttaaaagatgtttggggctgggcgtggtggctcacacctgtaatcccagcactttgggaggctgaggtgggcagatcacgaggtcaagagatcgagaccatcctggccaatatggtgaaacctgtcactactaaaaatccaaaaattagctgggcgtggtggtgagcacctgtaatcccagctactcgggagcctgaggcaggagaatcacttgaacccgggaggtggaggttgcagcgagtcaaggtcacgccagtgtactccagcctsggtgacagagcgagactccgtctcaaaaaaaaaaaraaararaaaaagaaaaagaaaaaggtgtttggaagccatgtcccatgaattccaaatacaattgaggactctataaaggactataaaaaaagttgtaataaattatgcagacccctcagcagttgactcacctctctggtgctccaggtatttctcagcgtgttcggggtctccctgtgttacctggacagctcctgccatcattagcacacagccaagattcctcgaccacccatgactctggatttatcatcctcaagaattgggggctgtggaaaagatgccaaatttgttcttttcagatttaggttcttctgtgataaaaatagacttggtaaagaagcagatatttctttaatacgtgtatatattagactgtgaatttattcatcttccttattcatcayataagtaaattatatgattggayccaggcataaaacgtgatttgactcccccttgcccatcacagttctggagttcacatatcatttgttactttgaaaaatgaacttttgttatttgattatggtgataaataatatacatggtagaaggagaagaaaatgaagaaaaatttagaaacttggacagaggaaaatgaaaatgttctattaattccactagcatgagataatcactcttaatattttgktgcatgttcttttctttcttctgarkgatagcatttttttcaacaaattgggctcgtaatatataggcacatagatatataattaaaaaaacaagaatttctcatgtcattaaacattgcttgaaaaaacatactagtaatttcctaagattayaccatgtaaatgaattgtattttatgtaaccattccctagtgttggatagctaggccatttataatttggacactattttaaaaaataactcrggcttatttwactatttatttttgccttacactttttgtamaagtaatcagagcagtaataatagatgactccccaaaatccttttgcctctaatgattagtctaagcccataatgctgtgttccttgccagtgattggtttagaaataggtatgtgacccagttctgaccaatggatatggagggtgcttatgaggaaggtttcctactcctaaaagagatacacaggaagagagamcttctgcttcctctggacactggcgcagcctggactagcagttgscagcttgggtttggacaacctccgaccttagttgaaaatgaccctgtgtaggacagaggagcaagtggaaagaacctgggtgcattgtggcattttagagccactgattcagctgtcctatgggcctcctaacccgaacctccactggtcatgaaataagctgttagtttggtgcaaaaggaattgcagtttttgccattgaaagtgatggccaaaaccacagtaacttttagcaccaacttaatattttgagttgggtttgaatcacgttgtctattacatgcagcaggacacatctctaatcacgcgagaggtctgagcaaacgtcttcacatttcacactgcagatattcttacaaaaggcaaagcagagatccagagaaattaagatctgctcaaggtcgtatccagctttgggaaccccaactattgcagaaatttctgaagtcgtcatattgctacttaaagcaaaatgccttctcctaaatccaggtagagagaaactctcaaaggccagggtctggactcaagatgagcacaggatttagaatcagaaagtgtgagttcaaattgccttcggctcttcacctgggtgggcgatttgaatagagctcacagccctgaaaaccctggttttcagaytctttattggtaaatgaagtcagcttagtgatatgagaattatgaaacataaatccctttgtaaaaatataaaataatcttacaatcatcatcgtcatcctcatcatcgtgttccttcacaccagcggtatttatggtatttatcaactaactgctgtgtactatgctctattgaaaatgttagcaatatagtaatgaacaaaacagatgttatctctacccttatggtttttatattttaataaaagtggcagaaaagaaataggtaaaacaataaactgagctctttggagaagaggcccacgttcttttcagattctgatttctccgtgatataaatagttttttaggtgatcacttgtttttaatgtacctacctatctawacctttctctctctctctctctctctgtgtgtatgtgtgtgtgtgtataaaattacatatccagtatgaaacctaaaaataagattttggggcctgtgaatttttttaacctttcttaacctacatcctaattatttgatttgacattgtgatgaaacatactgttgttttgaattttggaaatagaccagtgattcttcagtagggtcgtaaggtcccgtcaatgcagcagtcaaattttttcttggtgggggggatgcatatgtgtatgtgtgtgcatgagtatcttgataatttagaaagattaattaaacattgatcatctatgtgaccacatttaaaatgagcaccaccacatccaaatgtctgagtttacattttgtgtcggtacttgctttggcagaactctgtgcctttccccaagtcttctgtgaccttctcacctggcctgcatcctggtccttatcaaccgtattttacagttaaggaaactcggctcaaactagcttcggggactcgctgtggccataggtgccctaggctgcagtctgagagtgaaactgaggtctcactcccttcatastctgctctccgtctctgcctcatctggcttctcagggtggtggggcgtgggcactaatttgatttgatcacttagagacaacagcttacaaaatgctaccgagcagtgcctgtcctttctgagaacttgatataataacgttggcttgatctcctcagcctgtgtcttgagggaacaagtaaattaaacaagtaattagatccataatgtttttagaagttagaagatttaaatatatgaatctcatctgagtgtgcagccttttgtctgctgtgtttcctgccaaaagatctcttgacaggaaataaacattaaaataatctttaatcccttgtttggtctattaccattaacaattgatgcactttaattttgtggggttttaactacaaaatggaacggctaagtagtgataattgggtttggaattatacggtcatttatatcaacagagatgcaaggggctgggagggagggtgattaattatttactatttcctggctgtggttcctattatagaattttctgatatgttcttctgtgaacaattatcaccaaatgaaagtaaacaaatctgtgatttgaagccttatttagaagttagtctatatttaggtgatgtgggcttgattttcacagaccctgtgggctgtctgtgtgtgttccttttctcagtaccccagctctgtattcgagcgtggttatctttgtgcatcttaaaatccacaatgcacagcctggggagaagccttggttttgccagggggaaaaaaagaaaaacacaacattgagtgaggtctagggtgaatgccaaaggtctgttttgaaatgggggtgtgggttattcttctctctttctgatttgcttcagtacagtatgggatggggaagaatcaaaattattatgtcaacatgaggatgaaagttatgctctgttgtttctcataacatttgtgtgtgtgtgggtgggtgggtgtgtgtgaaaggtaggatcacctctctgtgcctcagtctccccatcatccttcggtggtagawcaatgctatctgatgaggccttttttgggatcacccactccaacatgcatgtcctttctctgtcccctcctggtgcctgtattagtctgttctcacattgatgtaaaggactacctgaggctggctaatgtataaagaaaagaggtttaattggctcatggttccgcaggccatacaggaagcccagttagggaggcstaaggaaacttaaaatcatggcagaagatgaaagggaarcaggcatgttctgcatggctggagtaggaggcaaggagcgaaggaggaggtactacccacttttaaacaaccagatctggtgagaactcactcactgtcatgagaacagcaagggggaaatcagccctctgatccaaccacctcccaccgggcccctcctccaacattggggattgcagtttgatgtgaaattttggctgggacacaaatcccaaccatatcggcacccactgagcacatcctcgtggatcttcctggctctccttacaaggggttccttccaaacccaagcgccacaatccttaggcagattgctctgacacagaagactggtgagttctagacttgatgtgtttcatgggaaacaggaagacatttaggggaggctgtagatacacagccgctctgtttagggaaggctgtcgatacaccgctgctctgaccatcatggcgtctggtccatgctcagattctggagtgttagggtcttcgggcacatggtggatgagcgttttgcttcgtgtactcatttatttctgaaaataatgcagccccttgtagggctttctggctaattgagtggtgccatcattcatgcarttgcrcaattcacacaccaggctgccactttggcccctgcgtcaccttcaccaccacccaatgtgtcctgctcatcactgaggtttgtcatttttactytgagwctgtccattgtcatcatctccaccatcaccccttttgttytcattgccacccttgcctggggtgagtgaagacgctcttctctggcttccacccttccaaatgcccttaacccacagatgggaagaaaatgaggtggggggaaggggactttcttgcttcctcatagttctcccccatcctgtaaaggagcctrtgcttcccgactcccagggccctgcagcatgtcaagaacaatattggacaagcttgtcagtgagggtccaggtggttccctgccactacgatgcatgctggggtcagtaaaaggagaacacagaagaatcagcagacccagagtctaacccctcctctagttaaagacgtgaccctggccgggactgaagccagaggcccacagcctactggacctttgtttcttgcagtcaggttctgatgacagattttagtcccctcttgaatttccttggatgtgatggaagtgattctcagtggacaagaggtcacattgccttttctagcttggaaggtggcgcaaataactgcttgaggctccctctcttgggccaagcttgactctggattttcattgktgtccttttttattaaaacaggttttgkttttttgtgtgtgtgttattttgttttttgtttttttgtttttcgggggctggagtagtgtgcaragcctggcggtgattgttctcattaraaagtatagtgtaatactcaataaattacttttgttctcaccttgggaagtggactmagaggccaagtgactttgatttttcactttatcctggagtttctcaaccttggcactattgacattttargccaggagattcttkgttgggggggatttcctgtgagttacaagacattaagcaacatcactggcctctacccactagatgccagtagcatcttctatttcctcaagtctcaaaataccaaaaacatttgtagatactgccagatacccctggggaacaaaatcacccctggatgagaacccctgctttatcctcttacagttttggttctttccatgagaaagtatttttaatagcaaagtaatgaacaagaaagtattaataagacccaaataataatataaactactmctttactaatggtcattatgtgccatgccctgctctaaacacttgccatgtagtcactaatttaatcctcacaagaattctgtaatgtagtgtagtttcccagggcttccttgaaaacgtgccatagactagatagcttgaaacaacagagatttattctctcacagttttggaggccagacacctgacatcgaggtgttggcagagttggttcctcccggggctctcagtgaaagcctgctccgtgcctctcctccagcctctggtggctgccattaatccttgacattcgtcggcttgtggcagcagaaccccagtctccgcctccgccttcacatggccatcttcactctctgtctttgctcccttttcctatagggactcaagtcattggatttagggctcactggaatccaggatgacctcattttaccttaacaagttgcatctgtgaagattccatttctaaataagatcacatgctagggctgggcacggtggctcatgcctgtaatcccagaattttgggaggccgaggcaggcggatcacttgaggtcaggagtttgagaccagcctggccaaaatggcaaaaccccttctctattaaaaatacaaaaattagccaggtatggtggtgcgtgcctgtagtcctagctacttgggaggctgaggcagaagaatcccttgaacctgggaggcagaggttgcagtgagccgagattgtgccactgcactccagcctgggcaatagagtgagaatccgtctcaaaaaaaaacaaacaaacaaacaaaaaaaaaacaaaacacatgctggtgcacacataaatttggaagaaatgctctttaacccagtatgagcacgtggtattcttatcctcattttacagatgaggaaattgaggcacagacagattcaataactacgtgactcacagagataaccgtgtagcagaatcaggaattcagcccagttttttcagttgcacagcctgagctcctaaccatcgcgcctggggttctcaaaggctcgtccccaagcgacaacatcagggtcatctgggaacttgttagatgtgctcaccctcaggctcgccccaccccgccagacttcctgaaccagaaactctgggagtagggctcagcaatctagttttagccctccaggggattctgtggtgcctaaagtttgagaacttctgatcaaaaatgccagataagaaaaaaaaacctttcgagacatcatttgaatcaattatcaaatgtttccaaagtgcrcttgctttgcaaaccactgtactactcatctctgcctccatcggagcgagttcaggagagttgtgtttacttttctaaaggagccttttccttcccattttaccagtgcccaaaagtcttagaaaaatgacaatgttcatatatttgcccacatgaagatagaaagtgtcatgtcaaagataaagggagaacagcattttctttttttacaagtcactcttacttaaacacacagcatgactctccttacacatttatttcrgaagagcaaagtccgggtccccaggctcaactatcagccgccttctcatcccaasggctgtcaccaccagaaatttaacatgctgttagtgcatgcaaaaaaaagcccagtaattgtagsgctcatcagtacattgttaattgatcctcatttcctattattttacctcaaagcmaacacatcattcaccatagtgacaccagagttgtttatcttctctgtgcaagtgtgtgctctttttagcaagctttttggatcctctgtttcagagggcctttcccatctgtttactattgtggactgtgctgctttttttgtttttaattacaggttatataaaatattgtcagcaggagggaggttattattaccttaaagaataagtggtagatgcggactggccactgtgagcccatcactaaaatgcacttccgtacactaaaggtccctcttccctggcagacagtggttcattttatttgaggaggtatgttgtgggcttggggaaacagaaggaaattggagacattgatatgcttcctgagaggtggaaggggccacttaacacagctttcatttttcagttgccartgggagaggagctggggtgggcatataatgagtaacattcaaagctccttctgtctttttttcagagaattcacaaaacaactcagggcctcctggtcctgcaaaagtgtttactgtttatttgtgttgtttctgcttgttttgcttgccaccagctccctactcacttgggggaaaataacccatcaaaggaatagaagctcaggataaacgtttcagacctttcagtaagatagtaaaatttctttcattcccagacctctctccaaaagaggcagccatcattaaaagtttgttatggattcttccagaaacgttctatgcatttagcatcagttgcagatatggatagccttttcaaaaaatgcatgcaactgagactattggctatgttttgtttattacctactttttccatttaatagtatcttggagattatttggtaccagcacatgtagctcaacctcctaatactgcatgacggataatatgccatcacatggtgtcatttaatatattcattcctatttatagacattgaagttagatccatgtcttactatyacacatgacttagtaatgaatgttcctgcatgtatatttggtctgcttgagcaaggatattgggagggaggatttccagcagcagaagtggtggaacaaaggcactgtgtacacctttgaaacaattaacttcaccaaaattactaaactgtcctctagaatggttaaaccaatttcctctctwccattcacacgtgagaatgcctgtggccccccagaaattatctccagcagcagcaacagagaggactggaatgccattgacaggtcccacaagtcagcaatcagcacgccattttttaaaattwatgttgctattgtatcgtaaggttcttctgaagcgaccacttcataacactgtgtagtccaatccctaagctgggcaatttttttttcccctttcaawacatcacattgattttctgtatgactttatctgcttaatacaaagtgggattgaacagttatttgtctggatttgatcattccttattaaacatttatgatttagctttcaccgcggcatcttcttgtaaggtgtttcttatttttatcattttccgtaaaggtaggattgtgttgacagccctgtaataaatgtctcttggaagagatgtgttgctgaraggtggggarggggtgggggctctgtgcatggaatggggggaaaagcttcagggaagggcagtgcaaattgtttctggactgatgccatctyytaataatagtagttaatagactgggtacaatggctgacgcccgtaatcccagygctttgagaggccgaggccggtgtatcgcctgagtccaggagttagagaccagcctgggcaaacagcctgargcaaaacctcatctctacaaaaaatacaaaaaatcagctgggcgtggtgatatgcatctgtggtctgagctactcaggaggataaggtgggaggatcatttgagcccggtagatggaggttgcaatgaaccgagattgtgccactgcactccagcctggatgatagagcgagaccatgtctcaaaataatgataataattgtagtagtagtagtggtggtggtggtggtggtagtagtastagtgaatgccctgactttggggtttgcagtaagctaggattaagtgcttcacagtgaggcacagtggggagctactctgaggatgaawtgcctartaaataarkgaggtttgtataaccgaggccagatcttagaacctcctgctatctgtacatagaagaatgttttagtcagaggcaaggcaaggtcaccaggattcactgagagtgttggtcagcatttcatctgcatatacaggactggaaaataagagagcgyaatgagacatctagtttttttctctttcgtttgttctgtttcccactgagagaattttctagctttatgtggagaaaacagtattggaaattattactcagttcaagaaaacctcactgagcacctaccatgtaggtgctcatcccgataccactatcaggmcctttggaccagttgcaaggatgcaggatgaggaaggcaatgtgagaaaacagaaggagcaccaggcagtcgtgggcttgatttttattttactattttttaaaaaacataaaacaacatacattcatcattttgctttctttggatgaagaattgagcctggttcagcatctcttgcaggctgtaattgagggtggtcattgactggggctggattcgggaaggatccacttccaagctgcacagttgttggcaagatgtagtgttttggtggttcctgggctctgggactcagctttttggctgttggttgttggctgttgccacatgggcctctgcaaaaggcagcttgtaacgtggcagctgacttttgtccaagtgagaaggtgagagtgcaagaattggtgagagagaccgcagccagggtgtttttttaacttaatcttggaagtcacatcctatcgctttggttttttgactgagattattcagtactgcaatagtctccctttaaagtggacaattcattggcttatcgtatagtcacaaacttgtgcagacatcaccactatctaatttcagaacatttttatcacccctaaaagaaaccctgtacccttcagccagcattccctattttatacccccgatctcttgacaactactcattgactttgtttctatgactttacctatttcgggtaattgatataaatggaatcatacaatacgtggccaactgacttctttcatttaatgttttcaaggtttgtgttatttcrtgtattaatattatgttggtgcaatcacttttgaaccaatctaactaatacttcatccccttgtatggccaaataatattctattctatcaatatattatactttgtttatccattcacagttcatgtcattcccactttctggctattatgaataatactgcgatatgaacatctggttacttctggctcttatgggtaacacttctataagcgttgccacaggttgcttctgatttctattatgagtaatgctgctatgaacattcatatacaagttttagggcagacttctattttcattccaatatctctttatggcatgtcttagcagtgatgtctatgacatccaggatgtgtcttgacatgtctgacatcatttaaataaaaataaagtagggaaagaaaacagatagtgattgtgtgtgtgatcagtgatggcttttgaggaggtgacatttgaactacaccctgaatgaagagagccatgcaaagacctcagcaaagaaaatctcaagcacaggtgcagcaagtgcaaaggccctggggtggaaacacactcgatgtgttcaagggagagtaagtggtgaatgggtttggagccaacarggataatagacaacgctatcaagarggggsccaaccacacatgtgcagccactgtatgacgtctggattttccttgasttatggtgatcactattgggaggtggtaagcaaacaggtgacataatttgaatcatggktttaaaagacgccatggttgccatgaggaggacaatgcgtaggaggcaggagtgaaagctaaaggatatgctgggaggtgaccctggagttaaagaragcaactaaggtgaccaggtgacaataatggagatagagaaaacaggatggattcaggaaacatgaccacactgagcatattcaaatgtaattgtcagttttcgtgtctccctcccackggaccacaagcccctaactcttcatgtacacaccctgactcccagtgtgggctggccacccaggaggcacccagtytatgtgtgctgcgtgagtgatgtggaatgactgcccacgtaggaagtggcaggttggagaaaaagcagtcacagctcctggctgctgtggctgctttgagcttcttcctcgatcaggctggatcattaccagcctgtaccctcaaaggatgcccttagtcctgtcccctctcactagcagggattccaagcttgtaaataaagtctcccacttaaaatgtgagcagagtgaagagctggcagtgtcaaaactctgtgtccagatgttttatgattttcccttttccagatgagcccggtgtatccgtatcagtgtgtctaggaagaccaagcatgccgaacggccagcagagtagaaactctgtgtgcccatccattatgtactccctgaattaggctccttgaggctcaattattaaagtgggatttttcttaattattaacagttaaaaataggaaaatagatttcaaggggaaaaaatttgcaggcaacaagagtccaattctaaatgtgtgcatgtgcgtaaaacggaatttgccaaacatgaataggcacttacaatgtgactggaattggctctgtcatgtgtcagcctaatagcctaaaccctggttcaatacaatgaacttgggaaggtttgcttaatgaaagaactgacgttttctgtgcagcggctgcattcatcagcctgcatcctgttcattacactacaaagggctgccaatgggaattggtaggatcatctattaggtaaatgcgatggggacaaaagatagcagagcccggggctttgtggaattttctgtggtggtccgggttcctggagtagggagctgtgatgacgggcaacagatttccaagttggcacgcgggcttctggagtcacgggctgaattccggcactgccacatcttgccacgcacatcctaagggagtgtagagaagagagttttcagttatgcatgacactgccttacccattgtggattcagtagggatattcataactgtgaatttgaatataactattaaataattgaattattattattgagttactgaatataactattgagttttccctctccatctgggcacatgggaaggccgtactttcctgacatgtgatttgctgtggcgagtggaatctgggggcaagagacgtgtgtctccttgaggcagaaactttaacagattccagcctgctgcatcataatctcctttccctctaccacgctgactggcagtattccagattccgattgccctgtcagggtgggtcctagtggtaggacaaaagcaagaatcctgagctgacccaagacacacatggaaacattaattgtgcttctctgatgtggctttaagatacttgctctgtcgcccaggctgtagtgtagtgattccatctcagctcactgcaacctccacctcctgggttcgagtgattctcctacctcagactctcaagtagctgggattacaggcatgcaccaccatgcccggctaatttttgtatttttagtagagatggagtttcaccatgttggccaggctggtcttgaactcctgacttcaagtgatctgcccaccttggcctcccaaagctctgggattacagacgtgagccgctgcgcctggccaagatactgagatgtgggggccaggcacagtggctcatgcctgtaatcccaacactctgggaggctaaggctggaggattgcttgaagccaggagtttgagaatagcctggttaacatagtgagagccccatgtttctaaaaatttaaaaaaattagccgagtgtggtggtgtgccacagtagtcccagctactcaggaggctaaggcagggggattgttggagcccgggaggtcaaggctgtatagtaaactgtgatcctgccactgcactctagcctgggtgacagagcaagacactgtctctttaaaaataaataaataaattaaaaagacactgagatttgggggttacttgtaactgtgtcataacctggctccttactgccatcggcatgcctagagggatcccagttttacacatcagaacaacccaagccccagtgtgtcacgccattacatgcttacagcctatttttacaaagtttgaatattgtaatttgcctttaaaaaattgttttaaagatctgcctaggtcarcaaattttatttactctctagaaccatttgattggggtactgccttaagaaataaagcagattccttcagtcgcatgtgggcctggagtcactggaaaatgcagacaaaacaagatctgctgattggcaaggtcatcttgggaagggccatcgtgcagtaaagagcaggtccattaattcaggggggatttacatcagttccatctgcctctttcctaatgggactgtttggttgtgttctttcctggagagattagtgattgaaaggaggagatctagaaagaagagataaaagtttacatttaattttcatgccatgcagcgttctacgaaggcttcctaaggaggctccatactaaattcagacataagtcagaaggcagcttctcccaagacactgttgatgtccagggggtgacagttccatcacaaaagggggttaaaagggtttaggggaagtttagttgtcttccttttatctctaactctaaaacccaactgctggctgaattaaaagtctcttacataatgrtcagaggagttttgagtatcggatctttgtgtacttgytttttaaattcagtcacgtcttaaatagtacttttcactctcctcctctccacaccactttatgtgtttgctagtagcttccatgaaactctatgggtgaacatgtctgcaactctttggcatttaaattttaggtttctgcccctcgtagcagactatctttctagaagcagagctgtaagtctcttttaacaccattttcaagcttggacaggctgacatttttattgaatgggttatctcaatatatatctacttttttgcatcctactttttttagaaaattaaaaatgatatgatgggtgtggtggctcacgcctgtattcccaacactttgggaggccgaggcgggtggatcacaaggtcaggagttcaagaccatcctggttaacacggtgaaaccctgtctctactaaaaagtacaaaaaattagccaggcgtggtggcaggcacctgtagtcccagctactcgggagactgaggcaggagaatggcatgaacctgggaggcagaggtagcagtgagccaagatcgtgccactgcatcccagcctgggcgacagagtgagactccgtctcaaaaaaaaaaaaaaaaaaaaaagataatgatgaaaataatagaatattgatgagaacacccattactctgctcattgttcaaatgaactcatttgagagctctctcctttgtttctgtctttctctcgcatcagcttgcatctgtttgcctatgctataaggcatcagtggttaccaggcagtgttgcattttttccatcccatacctctgtgtgtgttccttatctgtttctaggatgtgccctctgccccgtcacatcacaytctgtgctgctctcagccaaagctcttcttaaatacactagccatcaaaaccatacaacttggctgggtgcggtggctcacacctgtaatcttagcattttgagaggccgaggcgggtggatcacttgaggtcaggaattcaagaccagcctggccaccatggtgaagccccgtctctactaaaaatacaaaaaattagccagctgtggtggcacatgcctgtaatcccagctactcgggaggctgggacagragaaccactggaacctgggaagcggaggttgcagtcagccgagatctatgccattgcactccagcctgtgtgacagagcaagactttgtctcaaacaaacaaacaaaaaacatacaacttaactctcatacccccacgcctgtcttttctcctgttcgacttgactcctcttgggaattccgtaagtactttgagggcaaggaccacaagataaatgtcgtaaggtaaccaggaatgacattccaagattccattctttcctttgtatatccactcatcattcattatattcttactctgggctaggccctgggaacagttgagtaagaacaagcaggaacaaacaattagaacatttagtgtggcaaggggcgtgacaaagttaccaagagaggtaggtgagagacaggagttgttatctgcggggaacaggtgaaggagtgacagcagggggtgaggataagaaggaggaagctttacccctgagaagagcaggcatcagatgggctttggaatctacatgggtgtttgtaggtagaccaycctggaagttgagtgatggggaataaarggaagaaagtgcattctgaacagagggaatagcaggtacagcagctcagacatgggcaccttcagagcgtgtctgagtcttcctgatgagacacgtggtgttcacttgataactccctggcaggttctcttcatcgggcctccacatagggtatgcgaacctcttcatgtttttaaaagggagagatttaataaaggcaatttggkacttaaaaattgttagaagagctaaaagagtagttttgaggttgaccttcagaacggcttcctgaataatacagaagtgaccctccaggaaggcccttccactgaagctacaactggagctaagcagatggataagccaaaaccacctccgttgctgtggccccatctccaccacaaggaagctgragaagggaccccagaaccggaagacaaaaaacttccttcacacactcccttgctaagaggagaagccccaaagaagctggatatggcccttccctcacatttgctgtcccaagtgtcccatggcagtgcctaagcaattggtgggatggatttgtgtctataaacaaagttgcaagggagtctggaaagggagttttaactccaacttcttcaactagaatggtaggatccaggggcagcattgctccccaggggatgtttttacaatgtctgggatattttttagttgtcagaactggaagcaggaagaagtgctactgtcatctaatgggtcaaggccagtgatggtgctgactatcctacaatccataggacagtacctaccacaaagagttacctacccccaaaatgtcaacgtgcccaggttgagaaacgtgacctagctggaaggtgaacaggaactaaatgagtcagtttcagatatccaacacaaatacgtcacttgtttctgttccaaaagtattataatttttgtttgagctaaaaactagttacagttcattggataattgcctttcatcccttcaatatgtgttcccttgaaatttgcatccatgcatcccacatggcacccctattgattatttcagtgactcagaagacttcattattcaaaataatctctaataagatgtttagggagaaggaaaaataaagtttctctccacgttacgtttttttcttgcacatgtactgctttttcataagcacaatcttattaatagaacaagtcctctcaaaatggttgccttttctcccttcatcctcccccaccagtaatgtagagctgttatttggctcgtttttctttttcctccagaggcaggaagagggaatgaatggtggccaagaattttaaattcctgttcccggccgcccccggaagctccatctttgttgtgagggcttctctgcgtcagtagaggccagctgagctcttattcaccccttattctctggttccctttcaccagcaggtccagctctaaccacagctggagtttaggaaggccaggcagcgtgtgttgaatgccagccactcttctacccagggtcatatccttggatgtttttctgtgcatctgtctttyccgaccctcccgtgattctggaaggaaacacctttccaagctccccagtgaccctggttcatcccggaaatatgcaggaaaagcattatgagcattgcagtgccacatgctgcattggtgtgttacgttatgagaactattagggctgatctctgagaaacttaccagtggtgtgtgatcggaaatcatgtcaccctctgaatgtgggttatgggataaatggctaggtacacaggcttcagagtccagccagccccaggtttggattacagatggttgctgtactagatgaataatgtccccccaaattcgtgtctatctggaacctcagaatgtgacctcatttggaaataaggcctttttaattaaaaaaaawtttttatttaaaaaacagagatagagtcttgccatcttgcccaggctagtctcaaactgttgggctgaagcagttctcctgctttgacctcctaaagtgctgggattacagacatgagccactccacctacccagaaataaggtctttatagatgtaactgaaataaagatagagatgtgaatgtgatcgtactggtttagggtgggccctacatccaataagaatgtccttagcagagacagaacagagacaccgagagaggaaggtgatgccaagacagaagtaaagattggagtggtgccatctaccagccaaggaatgccaaggctgtggctacaccagaagctggaacagagcctgcaagcatttctcctgcagaacccccagaagggactcagcctgcagacactcagatttcaaacctctggcttcctgaactgtgaaagaatraattgctgttgggccaggtacagtggctcatgcctgtaatcccagcactttgggaggctgaggcaggtggatcacttcaacccaggagttcgagaccagcctgggcaacaaggcgagaccccgtctctacaaaaaataccaaaaaatgagcygggtgtggtggggcatgcctgtagtcccagctacttgggaggctgggatggaagcatcatttgagcctgggaggtggaggttgccgtcagctgagattgtgccactgcactccggcctgggtgatagcatgagactgtgtctcaaaaattaaaaaataaaacataaataaatttctattgttttaagacaatttgcctgtggccctaggaaaccagtatagayaacttgtgatggtttagcttatttagtacaacaaccctgccccttctagtttttatgataacctcattaattgccggtactctcagagccctgattttcttacctataaagtagagattccctatctcatttggaggtgattttaaggcacaaatgagacagtgtatgtaaagcatttggcatagtgcctgattcagagtaagtgaccaataaatagctacccttactatttagaatgctattatttagaacataagtatatttaagaaagcaccatcagtattcaatttgccttgctaataaaaagggatcaagatatggattgtaaagtagaaaaatacatgtcaattaaatggatttacatcttaaaaagtggtgaggtagacacacaggcactactcacttcattccttctcatctcaacccgttaggatttggccttcaactgggtagtggaaaaaatatgatccttggcagtctactacgcaaaagcaggaacatcatctgcttttgggtagttaagagttaagtatcactttgagctacaggatcatgattaaaaagcattctgttatcttacttcacaactctccacttttgtaaaagtttaggataccggcagggcagcaaatacctttaaatgattttatttaaatgtcagatttaattaaatccatgaccagaagacaaacccaaaggaaattttcagggagctttagaattttccttttccatgttcaaggtgataaccgtagcataaaactgtcccaaccacatgcaaatgcaagcaggggcattcatcatgaaaatacagctctcaaggcggaagtgcttgttaactttgcactctatagccaagtgcgatgatcagaaaatacatacattgaagacaccagaaaatagtgtatggattggtgattttgactaaractggaatgtgggtgtgtgcactcctcatgttccggtttctgtgatcattcaggcatgcacaggtatcctgatgggtarccaggtcattaggmccaragtcggcagtgtagcatggcaagagaagtcattgcatctccaaactgtgcctaaattgcctgtaatgggttctttgcaacttgcagaaccagatcttaccatttgcaaggagaatagctgaaaagatacttaaataaaagtgatcggatgaaattttaaaaacgggaatgaccaaaaagattcccagaggaccgttactggtctgcagccccccattttagggtctggcatttgtactgattatggcctgacagctcttgagtttccaatgataacagccatctgacttgatcggagttctatggattttcactaaaatagaatcatcgccttggtgatggatagaaaaagtaaagcaatacatcctgataaatgctgtgccttcctccttcgtctcyctggcggtgaccttgtgcaatccataagagggcaaggctgagagccccggccaccgccgccgtgtgtcagaacttggaaatttaagtagctttgaaacccgtcaatggggtgaagggggaatggcctgagaaagcaatggatcatgcttagagggctcagagggaaatagggtacgctgaaggtcaacgtgcagacatgtcctgaaggaacagctcaagtcctcattctcattcacgggaggctgcggccctgtgaggtgagatcagtagaagagtacaataaaacaggaattttcagagcatgtaatttcttcttggaagtgaaaggcactggagaatggtgcagaataagyactagccttagagagaggatgccctgccccagtctctttctctgagtagcagagagctggctgtgctaggaaactcttcgcctctctaacaccacgtttattctccagcccagttatcttagccaactgtgaacattttgaacactgttgatcatcggtaatgacaccagcaccataacacgaaacccctctaaaacagggcttccaggaaactcacagactagttacatccccaagccttgcatacttgattggaaagagaagcttctggatggttgaaggggaaaggagttagacgttggcaggcacccattagtgttggttacgacttgctaaaagaaaatattaagataaaaattagatcataaatttggagccaccattacgaagcctaaagtgcaaattgccaaacaagtcaagagactcattagcattttatgtaaatcagttattactgttctccacttccttaattatccatgttatttcaatacaaccctttctttgatgtcccaattctatatttaaatagtgcaagatttctatcgtatcctcccgcagaggtttgtgccatgcaaaaaacatgccaagagcagctattttagagactacagggaaatgtttaattggttcatcccatttgagttatgagggtgtattactgagcacataaaatcagaaacatggaaagtactagcttggagaagtttactaaaacctgcaagagaccgcttgaaattttgcccccaagactttttggattctcgatgggaaccgactcaaagagaaatttcgcaaacttcatggaattttgctaagtgattgatttataattgaaatatttggaaataaaatccaacagctctctttcctttggctcagagacttattgttttggttggatgaagagaacacttgtgacagagggaggaacatagggtgcataagagagatgtggggaagcactccccatccaactcgttccaaccagttcatcttttttttttttttttcttttttcgagaaagagttttgctcttttccccaggctggagtgcagtggtgcgatcttggctcactgcaacctctcccttccaagttcaagcaattgtcctgcctcagcctcctgagtagctggaactacaggcgtccgccaccatgcccagctaatttttgtatttttagtagagatggggtttcaccatgttagccaggctggtctcaaactcctgacgtcaggtgatccaccctcctcagcctcccaaagtgctgagattacaggcttgagccacagcacccagccagaacttcatagtttactcttattattttctcctaaccactaggttccacacttctggccacctgcctttatctcctgccccataacctaacctgttttaaaatacttattaaacaaagaaaaataaacaagaacaaatggagaatctttcactatgactgcaactgaaaagaggagtaatggaaggacatgtactcttcccatatatttttaaacaattactgkatctgatttttcatttttcattttttttttttctggaagaaagagcagatctggataaagtcagtatacaatgtggtctttggtgmcagacccaagttcaagaccaaggtgtatgcatgggtttgttcaagttgtctacccttattatcccctcagtgaaacatgattaaccatgcttaccttgaagagttatcttaaatatttgtgttaatattatatatgtacattacatggtaagtgctaagtaaatggtacatgtgagtctttgctctaggcaaggcgctgtgctgaatgtttacatagatgatcggatcctcatattggatcctcaaaacgttcatcaaaatgggtaggattatttttatgtatatttaacaggtaaggaaaatggggtttctggaggtgagtgactcactcaagatcacgtggaatcaagcagagaagctggggttttaattcagaagttctttaagctacagctgtaattgagacaagaaccgtacactgtagtaagattaatgtaaagatttaaaaaactgttcatatcgttcatctacataaataaataatatttacagaaactcatctctgcagactaaagtactttaaatatttaatctaatttattggttatttatttaacaaatacttttatgggccttgccatgttccaggcacggttgtaagcacttacaactagtgactcatttaaccatttcacaaatatttattttgagagcaagcacgggggtttatgtgatggctccacagagcagtgaaaagactcccgccctactgctcscaacctcaratgtccctggscacwagcccatctgtatgkctttaaaaaaaataaattaaatttttaaaaacatgactttctggccaggcgcagtggctcatgcctataaccctgcacttagagagggcaagacagaaggatygcttgaggccaggagtttgagaccagcctgggcaacatagcgagaccttgtctgtactaaaaaattattaaaagaaaatatatatatttttttaaatcatgacttttctgatcatacctgtggcatactcattatagaaaatttggaaaatgtaagaagtcataaagaagtgggaaaaaatttaaatccttctctgtcccaccacaaaccatttaaatcaatccaagattttagtggaaagggaaagcatatgatctagtacaaagaattttttttagcttcttctccgctgcttgtttaagaatctcagagtaatccagacgttactactccataagcaaatctgggacagtaatcagacaaccagacaaccagactgagagcccccaagggttcaaattcctgagcgccgtgtcttctctatagcttgctgtcttgttctatttggatataaagctaccatcaagcagaagaagcgggatgctctctacagagtccgaaacaaaacacagaaaattaacctgctaccatcctctaaagaagcgagggtctcagactttgtccccttttgttcctgcattgccctccattcagatcttgtcacttaggccttggtagcatgagctattaacagccctccatatttactatttttttttttttttttaactctgggasttcctgttgcagaaattggatcacttacctaaaaagctccccacccccacctttggtgactggtgggtttcatcaccaggaaagcacattgttccaactcaaagtctacagtctaaaatcatcatcatgtattttcatcaggatgaaatatcgggcactctgctcagtgcaaggttttattaatgatgtgctgtcaggggctggatgttctgcatatttgcatattaaacagctgagtgaagaaacattgcttttattgctgcagggaataaatcagtttaaagcaagttctcatcatttatactcgtttcagctaagtcttcttttattgaaataaattgttgaagtgctttgctcattctttgaatactgatgaactttaccttgataggacctcaggaaaaataatattttcttaaaggtgcagtattgttccatttttgagtattactttaatacattattgataagttaatttagaagtatcaagtgaaaggggaagaaaaacagttttgaataaaaacggwgtttcctctggactattttgccaaatgcatttttattggtagaacgtaagcaaatttaaaaaagcaacaaaagcagtttttatgaatacctagcgtactttttttttttaatgaaccatgagctgtttttgcattcaaattctcgtaggcattatattgcatctacacataaggacacagtgtttacagaccccaaagcttgctgtcccctgggcaggtgcatgagggggtcccaggcaatcaggctcttctcaaacctgaattatacccggcctcarggtatargggtcaggcagctgtttgacaggattcttgcaaatgtttttggtttctctgtctactcattacgtacactctgccagaggttgaaaactcaatgttgagatyacatacatcctgaaaacactgkttaaataaaattttggcctgcatcctgtttttgaaaacttgcaatggcttgccaacgttttcaagttgagaagtttcacaaaaaaaattcggatttccagcttctttcaaaaacacaggtcaaacatcctgagcctgttctgtggtcagttactcattagcagcctctgctctaggaggaatagttatgggtcctttcagacatgcaacccccmaaactccatgttgtttacagtgtgggacacctgactttcaccttttatgatacctgcctggggcatgcatgtggtgactttttccatctctggtctctatcttatctcttgtgatgaactcaggtctataaagcatttgggcactgcctggcacataggatatgtccagaaaacactagctggtattaaaacagaggaaacatgggaactgagggtggtcagtgacatcacattgtatttcctttatggtgtccttctgagtacagaaccaaacatttcttaggcgtacaatttcctgcctccaaattaatgttatttctaaaaagtagcccgttccactcctacaaatctttgcccaaatatgtccttttcagggatgacatccttagccactgtttaaaatagcaaatttctttccaaactctgccgtccctgaatctctaccctgctttatttttctccttagcagacatcatttctctgtttaatctgtctacttgctaattgtctcactgccctccccctccccactggagagtgaatgaaggcttaaggttttgyctgccttggtctctcctgggtcctgagtaccagtggccttacgtggcatttggtagattacatgcttaatgaaaagtgagtgaatgggctgggtgtggtgggtcacacctgtaatcctggctactcaggaggctgagacaggaggatcgcttgagcccaggaggtcraggctgcagtagggtatgagcgggccactgcacttcagcctgggcaacagagcgagaccttctgtctaaaaatatttatctatattgagtgaataaatgaatgaatggattattttagtttggcctcaatctttatagaaactcaattcaacaaacatttgagcacctgtttgttcagggccacgtgctggttgcaacctggaaggaaaagctgggcaaggcggagatccagtgctcaggaagctgagtccatgccaagatgtgataattgtataaagaactacaataggcataggtacagatctgtaaaatatgaaaacaggaaaacacatggagtcttggagggtagggaagtcttgatgagtaagattgggtctgagataaacctaaaagagggtcaagattttgacrgagggctggaagggaggaacgataggaaactgaccttttttcagatctcttcttgtgcgtggcctggggttaagtgctttacatgcatcccctcattgacttctcagagcagctccataaagagtccctgtgcttcccagtttactctggagacgactgaggctcacagaggttaagccacctacccaggctggcaccgcacactttgttcagagtgggcctggcatacggcatcagttcagcctggccctagacccttttcctcccacaaccatattgcccccagtggagagacaggaaagcagggaagggggcaattgccaagcctgtttctagaatctcaaggatgccatttggtgaagctgaggctggtgcagttactctgtggagacaccagcgtcttggacctagggatggattcagggaggattgtgtcccccagtgacctgctttgtgaaaggtagagaatagattacaggtgcccgagatcctagaacccgtttcttaccatgatggcgttgaggtagaggtagaaagatgggtgaggtggctgggtgcagtgggttgcgcctgtaatcccagcactttgggaggccaaggcgggtggatcacctgaggtcaggagttcgagaccagcttggccatcacagtaaaacccygtctctgctaaaaatacaaaaattagccaggcatggtggtgtgggcctgtaatcccagctacttgtgaggctgaggcaggagagtcacttgatcccggggggcagaggttgcagtgagccaaaattgcaccactgcactccagcctgggtgacagagtgagactccatctcaaaacataagtaaataaataaaaaataaatataatacagacacaggcttttctccccacctcttttaattcttgaaaggaacagtaacaagctcctattcctgtttccttgccaggagaagtattgttttcatataaatcatttgtgacagaagctccttatttttaagtggaaaatgcacatttaataacatgagaataatgtccaaacatcttctcattgatggctgccaagagaacagcagcactcttgctgcctgcagaaagagacactcagagtcaactgttttaggggccatgctgtcattgctgccgcatttgcttaggtgggctctgagcagcagcttcccagacactccgtaaccaatggcagctgagtgcttttgtgccttgcaaatcctctagtcagagcagacctggcttaggaccccagccctaccactaactgactccatgcgctcctatcggttctttattttacctctgcaagcctcagttttctcatctgtaaagtagggataacattagcttcagccctcacaggcttagagtgaagtttaaataagaaaaggtatctaggctgggcgtggcggctcacgcctgtaatcccagcactgagggaggctgaggctggtggatagcttgagcccaggagttcgagaccagcctgagcagcataacgagacccgtctctgcagaaaatacaaaaattagccaggtgtggtggcatgcatctgcagtcctggctactcagaaggctgaggtgggaggattgcgtgagcccaggagttcaagaccagcctgaacgacrtaaaaagacctatctctacaaaaattagctgggcatggtgtcacgtgcctgtagtcctagctactcgggaggctgaggtgggaggatcgcttgagccccgggaggtagaggcatgatcatgccacttcactgcggcctgagctacagggactctgtctcaaaggaaagaaaacaaacaaacaaaaagccatgtagagctgggctatccaatacttgaaggtagccagtggacacgtggggccatttcaagctaaattaaattttaaataaaattaaagattcaatctctcactcacacattacaagtgckaaacatccggacacatctagtggctcccactgtgggtagcacatacagaaagaacgtttccgtgacagtagagtgtcccattgcacagtttgggtatggagcacttagcccagtgttgggcacagtacctgctgtgatggttaaagcttagttttattggccaggcatggtggctcatgcctgtaatcctagcactttgggaggatgaagtgggaggaaagtttgagcctaggagtttgagaccagcctgggtaacatagtgagaccctctgtctacaaaaaactaaaaaaatttaggccatacttagtggctcacgcctgtaatcccagcactttgggaggccgaggtgggcgcattgcctgaggtcgagagttcgagaccaccctggctaacatggtgaaaccccatctgtaataaaaatgcaaaagatagttgagcgtggtggcgcatgcctgtagtcccagctactttggaggctgaggcaggagaatcacttgaacccgagaggcggagattgcattgagccgagatcatgccacagcctgggcaacagagcaagactgtctcataaataaataaataaataagctggacgtggtggcatgtgcctatggtcccagctacttgggaggctgaggtgggaggatggcttgagcccagaggtagaggctgcagtgagctatgatcttgccactatacatcagtctgggtgacagagcgagactctgtctcaaaaaaccaaaacaaaggtcaattttttttccacattcatctataaaacaataaaggaaacatcctagacacttgaatcagagcccttttaattatgacttcaaaaaacagggctcgtgccacccaagatttcctccatatacaaaaaaaaaaaaaaggaaaaagggaagaagcaaaggggcaatacagggctctgcccattagaatctctagggacagaccgaggtttgagagttcctgctcctgatctcaggggaatcctgaattacaggtgttaacctgattakccccagcccagctcttcgttaattacctgaagtgaatgggacagtttccaatactcagcacaaaggcgtgcgcagtgactctgtggcgtactatctatttggccttggaaagttactctctaagtcagggcttcttttcttcaactttggtgtgagactccgctggagagctggttagaaaaacacaagtctcgggccccaccccscagagcccctcattctctagttctgggttggggcccaggagtctgcttttctagcaagcgcccagatgtcactgatgcttacagctctcagaccacagttggagcagtgatttttaaaagtcttttcatttgtaaagagttgttctccatgctccaaatgactgtgacgactgagaaaatgcatgtatgtaaagtctgcagctggtgacattgtagacactcagcaaatggcctttggtgttactrttattttatttttactaattattttttacacctacaaatcaggatctgctacaatcgcttgatatttgaaaattgggcctaacccactatgccactcttctgtcatgaaataacaatcttctatttaaactagtaaacttaatagtttaaaatacttggtagtttaatagtttaagtagagccactgaaagatggctcacacctttcagctcagtttttttgtaccagtgaggatgaatgtttctgcatgtgggtagttggcaccagtcttcaatgaattatttttcctttagccgggtctggtggtggcgtgtacctgtaatcccagctacacagaaggctgaggcaggaggataccacgagcccaggagttggaggctgcaacgacttacgatcatgccatggcactccagcctgggtgatagagcgagaccctgtctctgaagatacaagaaggccacatgtggtggttcacccctgtaatcccagcagtctgtgagactgaggcagaargattgcttgagaagtttgagattggcctgggmaatatagcaagatcccaaccctattaaaaaattaaaaatgaaaataaaattttaaagaaaggtatttctccccttcacggtaatttggagccartacttcttgcaccattcatttgtccacagcatgggacaaaggataatgccttaatgcctgctgcaaatagaacagtggtgcttagcagctttagataatgcattgtaggtgttttgcaaaaacatactttcgtgactaaacatcataagctccaagtgagtgatttccccgcgtaaatgaatgwttctgtgaggataacacttctaagatgtgagatttcaataaatgaatctgtaggctgctgtgatggatacctttggtggggtaggaaggatcgtcatttagaacctgggttctgactccagatgacttgttttgttctatcccagaaatattcctaaaatcgatttccagtttccaaaagagcaggtaaggaaaacactgagtgttacttggtctttaaaattttttttaaattcatttttatttttaaaaaatagagacaaggaggtgggcgcggtggctcacacttgtaatcttagcactttgggaggctgaggtgggtggattgcctgagctcaggagggcgggtggattgcctgagctcaggagttggagaccagcctgggcaacaaggcgaaaccccatctctactaaaaacattaaaaaaaaatttaggcgtggtggtgtgtgcctgtaatcccagctactctggaggctgaggcactagtatcacttgaaccggggaggtggaggttgcagtgagccgaggttgtgccactgcactccagcctggctgacagagggagactctatctcaaaaaaaaataataaaaataataaaaaaaaaattacatgaaaaatagagacaaagtctcgctttgttgcctaggstggtcttgaactcctgggttcacgtgatcctcctgcctcggcttcccaaagtgctgggattacaggcacgagctgccrcgcctcacctcttgttttcaataccattgataagttgtggtcttcagggacttgtgggcattttcaagttaaatatccaacaktcgtgatttagggcatgaagagctcactcatcaagatgtatgtaattcagattttctgagtgtttaattcggcgtctttggtcacaaggaacagagktttacttgtgccacctcttctaagaaaaaggtttactgtaagagataatgttggcaagctgaggaaaggaggcagttttgggtaactgtctcttgcgatcccctcctgcacaactgtggcgttctctttttctgactagctgattctgctgctgctggatttattcattcttctccctcacarttttggctcgcacatgcttcctttttagctcatgrccgtgcarttcaactcaacctcatggcatctttttatcagctgtccctgctgcaacaggcttagagttggtttcccaattccctagcgcagaaatccactggcatgagtcatctttcccattggtagattgcagagcaaacttctggacagatttgcccttggctcatgtatgattggacctgcggtctgtccaggtgtactcagagtggggaaggggagcggtggcaggtaatacaaaacccacctaagtagaaggacctatgaaccatgagggttttccttagcagggagtgccagtgggtagggatgactggttttgcagtttagggccaagtgagttggaatgacagctgtggcgtgttgagtcagatcaagtccagaattcctctccaccccacccatttgcagttccctcagatttattacgggacctggatgtgatgcaagcatgcccgctggctcaggctgtgcctcacagctgcaacatccctggggtggagaagccatgtgggacctcacagaacactccaccgtccctgctaatggctgagaaaggactctgccctcatggatggggttgggggacctgttatcttcttccaggttaatcttggtttcagctgctttaaactctactttttagtgggacgcatcatactgaactatggaagcaccatagttgtcacctagttgagcttctctttgttcccatatgtttcagtgaagcagttatagcttcagaaaagagggagccaggaaatacacttgtaattcatcactccttttatagtcagagcataggaacactcatagtatgtatcagaaactagtgaacacatgttgttttacagctctgtctgcaaaattgcatcgtgggcctctttggggagtgttctcaatgtgatttttattctggggtgtcctttggccacaatcctcaggattattttttctctgtgctgttcactgtaacatcgtccaccctctgagatcttgcttttcagtctactggtatctccacttctctctgcagcgtgatgtctagtcagagtttccattctgtttttatgaccctgggaggactgggasagatctgtgaggtcatcttgtccaccctcagccagggcaggagtattccctaatggtagagtcaagtgtttggtttggtcttgtttctaatgactcaagtgatgaggcctggggacgtcccttgggaagctattctgcagcctaataactttcattctgtgatttttttttgtatgtgtctaatattcagagtctgacacaataaggccataaagagctaagtctgtctatggtagatcttcacctgggaatgttctcctaatagtcacttttgttataaatcttcacctagcatgggagttaagtgcattttaaaactagacctggggactatgtrtcctaaaatgcaaaaatagcccccaaaatgaaaattaatgttgagaatctagtcaatctgccagcagtacgtacataactgttctgtgtatatttcacatggccatatatgttttgcttgtgtggtgctaaatgcaaaggcagagaagcttctgctattgaatgcttagcacagaactcctgtcctccctctttgaaattattccgacagttgcccctcatttggcttgccaaggagtaagatcttggcttgtgtgtttctcccatgtgtggtgtatctgtaatctcggtcactgttgagagcctggtgggaggctgattattgttgagggaaagatctgagagcagggccaagaaagggaaagagagagagaggaaaaaaaacaaaaaagaaaaagaaaaaagagaggtgggtagggagggaggagagacatggayccacggggaatgggaagagaaatagaaatagggaatttgaaatggaaataaaacaaaagggcaggaaaggaagaaataaagagaatgagataaaaggaaaagaaagtgcaagtagatttgggatctatagattggggaaagacattcatacagtcaggaccagatgttcactggaagttttttccttctggatccttctttggctataggaatctggttctcaaagtgtggctcccaggccagcaacaccagcatcactcagaaatctgttagaaggccaggcgcggtggctcaggcctgtaatcccaggactttgggaggccgaggcgggcggatcacgaggtcaggagatccagaccatcctggctaagtcggtgaaaccccgcctctactaaaaatacaaaaaattagccaggcgtggtggcgggcgcctgtagtcccagctagtcgggaggccgaggcaggagaatggtgtcaacccgggaggtggagtttgcagttagcagagatggtgccactgtactccagcctgggggacagagcgagactccctgtcaaaaaaaaaaaagaaatctgttagaaatgcatattttctgttttcaccccagaaatcctgaataagaaacactaaaggggagtgggcccagctatttgtgtttttggargaactcctgttttaatttgttttttcggaagtcctccagtttgagaaccaatgataaggacatttttccgggaatccagttgttttaggaaaggcccagtaggcatttatgtttataagcaactccaccctgcactccatatgccttctgtagctatctaacagagacagagttgacttgcagaaactgttttctctggccaggagacaggcttcgttttcgaaactcacccaggaaggcagtgttcttcttttcaaaaggcatttttctgttgactgtgcaygaagccacatagtaataaacagtttccatatccaagcagctaaggcttgtgccttgcaagttaagtggaacatcasgatctatatctcagttttccttatgtttccccagttggcacatcatggccaacaagagagtagggatcattaaggagtttattttcatctttattttatcatttaaaacacatttttttttccaatgagagtactgatgacataaaaggttatacattgaataaccacccaaattagcagtgtttcatatttacactgttcaacacagttctcttgtstctgttcatgatataacagtaaatccaagttgctttaagtagatattggaaatatgaacccaatatgttcttaacatctcyatgtcgtaattctaatttaaaatcaaaatctcatcaaattacattttagattaaagsattgtacctatcgaaagaagagaatcgaaaatgcgaaagtccttcattttcagtgtggcctgagattgttgaaggatttgttctattgcatgctgataaatatttatcacggttaagtgaacaatcatttggagacagacaccattttatgatgcagcttctcagggcgtcctaattgtgactctgccttgccattctatgttttatcggaatacgcagacatatactttatgaggttgggtaatgaagagagagagaccccaataaacatattttctaagagtaatggttatctatagctcaggaacccttggttagcacagcctctattacacagtactaggcaagcagttcatagctcaattagatctaacttgcttcatttttaggcattatgttattctaaattaacactgtatttcatattctccaggtctgactattaaccagattttggaacctttagggcttattatttagtaatccctgaagctctcaagtaggcgtttttaaattcatgcattagaacagattaaaaattagctagaaacgcatgttaaatggcccactccctttcttttgctaattgtgctagaaatgaaaaagaaaatgcaagtgaggtcagatctagtgtggtacaaatgaacttgctacttggtttgctgccaattgctgccgaaacaggagttatttaaattagtaaataatttttgaaatcttcttagaatgtcacaggccacaattcaaattcacagaccaggaatggttattatttctatatatcttaaagttttctgcaatagaaatgcatttcaaatataagctagaaaaaaaaaatgtgaggccttattgtgtagataaaagtgacaagatgtccaaatgttttgaaacgcagtgatttatttaagttgtagaaagcttggttttatttcttgttgcatcgtctttatccttagatcttaatcagaaataggaaaattttctgagagaaaattcacgagatcattcatgatgagtcactatatcagttactttaaaaaaaaaaaaaaagatcctgacaaatcctactttttcaggtcctgatgcactaagtctcattcacttctttctatttttcctctctctattgcatattaacccaccatattgagagaatagaaacttttgccttcattatatcacctttacaccccaggacaggtgccctcctcagcggagacaactgtccccctccatcctgcaggagttttgcagccatccttccagccactgcttctctaccggggcaaatyttcccccaagggataattgataatgtctgaggcatttttaattgtcacaacttggggaaggggcaagggattgagggagagtgctcctggcatctggtgggtaggggttagtgatagggttcggctgtgtccccacccaaatctcatcttgagttgtagttctcataatccccacgtgtcatgggagggacccagtgggaggtgattgaatcatgtgtgcagttacccccatgatgttttcatggtagggagtgagttctcacaagatttgatggttttatacgatgcttttcctcctttgcttggcacctctccttcctgctgccgtttgaagaaagacatgtttgctttcccttccaccatgattgtaagtttcctgagacctccacagccatgccaaattgtgagtcagttaaatctctttgctgtataaattacccaggcttgcatatgtctttattagtggcatgagaacagactaatacagtcagggatgctgcagaacatctccaaacacacaggactcccaccctctacttccaccccaccaacaaagaatgattcagcccaaaatggcagtagtgaccttgttgagaaatgctgttcaagccatacgtcaccattggaaggttgccaaactgtgctttgcacacacatgctgtctgcacgccttgtatttttctctttgcttagtcctgctcatgctctctaaacaccccagacatcatatctctttaagaaactctggctgagtcccataatgttctggggcaacttctgtcttcccttttccctctggcaaagaatccttgaccaaactttagctcagctcctcagagcccacttctcaactagaccttgaccttgctcctctctccttgctggatcttcatagtccagtctttgtaagagtcattctaagtcagtctagagagaatcccttcacccttcatgtctgatcacccttgcctgccttcagcaaaaatcctgctaacttggttaagttggaatactcctacccttgtggttccttgtagtaatttgcatccactgaccctcccactcccctgctactctgttccttgactataaatctccagctgtctttattatatttggagttgagccctatctctctcccctattgcaacagccttgacccctgttgaaataatcctgcataaagtcttccttaccattttaacaaatgtcaaggtaactttgttttttgttttttttgtgtgtttttttggagacagggtctcactctgttgcccaggctgcagtgcagtgatgcaatcttggctcactgcaacctctgcctcgcaggctcaaatgattctcctacctcagcctcctgagtagctgggattacaggtgcccrcccccatgcccagccaatttttgtatttttagtagagatgcggtttcaccatgttgaccaggctggtctcgatctcctgacctcaggtgatccatccattttgggctcccaaagtgctgggattacaggtgtgagccaccgagcccggccaggataactttttaacaaccccccctccacactgccaactttttgaggaccatgtgttgtgtagggccggatatagtgcacatggtgaacacataaataatgtttgttggccaggcgtggtggctcatgcctgtaaccccagcactctggaaggctgagtcagaacgattgcttgagctgaattgttcaagactgccctgggcagcacagtgagaccccgtatctacaaaaaataaacaaacttagccaggtgcggaggcattcacctgtattcctagctactcaggaagctgagatgggaggattgcttgggccctggacgtcaaggctgcagtgggccatgatcgtgacactgtactgcagcctgggcgacagaatgagaccctgtctgaaaattaaaaaaagaagaagaaatgtttattgaatgaagacatgaaagcatttggtggaaatagggcacacacatgaatatattcacagttgcaaactcagaaggatactcccaacctggttctttgtcttgtccctccatctgggtgctttccagtcacagcctggatgcatgtatgaataaacttctaccattaagtccctgaattatttaagcactgccagtgattctatataaaccgttcagtaaaatgaatggcatatgcgtatgtttcaagagctccagcagcctacccaggatggcttgatgttgtctcttagcaccgtatcaatacctgggggttttcaaatattgcaggtggccgaagcctttgtgttgaggtttctgtagtgtttatccatttgtgaaaccaggcctcaatctatatgtccaacgccattcgtagaccccctttgataatctccactaagcagacatactcgatacatcttcactaatgagttctgacttcataaaatgtattaatgacttctttttgaaagtaagagtgctttgaataccagtcrttattgctttagaagttcataaaagcaaaagcacagtatttcccccagtgtttgtgcgataagagaatagatgtaggtccagcgcctagaattttagctatgcttctcttgtttgtgattccaggtttcagactgcctggtagaaggaggtcacttctgattgtcagtgactttggtgagttcttaccttgtaaaagatttacaattatttcattttcaacatagctttatcttatgacaaaggtgacagaaaggaaatctcctaagttggcctacagggtgctttagaaaacatctggctgggcatggtggttcacacctgtaatctccacacttygggaggctgaagtaggctgaagtgggaggatggttagagcctaggagttcgagaccagtctgggcaacaamgtgagatcctgtctctacaaaaaataaaaaaaattatctgggtatagtggtgtgcacctgaagtcccagctaactgggagtctgaggcaaggaaattgtttgagcctaggaggttgagagtgcagtgagccgtgttgctgccactgtactccagcctgggcaacaggacaagaccgtgtctccaaaaggaaaaaaataawaaagcactgtctctctctacccttgcagtatccctgtaggagagagttactattagctcccagtttataggtgagtgatatggtttggatgtgtccccacccaaatctcaacttgaattgtatctgccagaattcccrcatgttgtgggagggacccagggggaggtaattgaatcatggggcccagcctttcccatgctattctcataatagtgaataagtctcatgagatctgatgggtgtatcaggagtttccgcttttgcttcttcctcattttctcttgccactgccatgtaagaagtgccttttgcctaccaccatgtttctgargcctccccagccatgtggaactgtaagtccagttaaacctctttttcttcccagtctcaggtatgtctttatcagcagygtgaaaacggactaatacagtgaggaaatccatgtgttaggaagggagtgtggttgtacttcaacctggaactgtctaactcytaaggttttattaatatctagtccatttctctcaatctaatagtaaatggaagagaagcamcaacttttgttttccaattccttttgaacatttgaaaggttttctgaaaggacttaaagaaaccatagcttccttaccagttcccaaagcttcagtccttaccaaagtgtacattgcctttaaggagatttgtttccatcaatccctcccatttacaaggaattacagaagagtgatgcccccttcaaagtggctcacacctggctgacatctgttcattaagaatgcctgcctttgggttctaagacgtccaaggagctcttatgggtaacacctgtagatttatagacgttcctctctgactgtaagggccatatgcctgaatctctcacccccatgtttataaaacttaacaattgtggaagcaatgaattgaaggactagggtcaccagtggagtcccataaataggttgtttatgatccctgtgaaacaagaagaccctyttaatttcatgcttcttaaactggggtatgagtggccccaggtttccctgttgggggtactgataccagagttcatttgaagtcattggaaaccaaggcatattttcttaaagagacaactgtttttggtgaataggccatgttgtttatagtwaaaacaaacatgaatattctgtaatagaagatatcgtttgcatggtgttttaaagctaaaacttgagttattaaacacccttctctccctggggatgccttttgctatggggttgcatccacggaagagtttgaaagcccaaccatatggacatcatattattcatttttatttgccatccagagcttgccagcaaccttttagatctctttccttggaaggttcagcaagatgcttgtaaatgtatgttgctttgttgcagacaatgtatatttaaaaagcaattatttgcccatctcttgttcaactcagatattgactgcctttctgtatttctggctgggcattgtttatctccacctcatggtttttactatggttctagaggtctagcctacaaagagaatgcttcccgtccccaccactacccacaggaccctctgcatatctcagaggaatttctcagtgttccagttaattttctctctgtttcctttattacttctaagttccattgcaaaaatatgctgcctgctctgtcagccaccctatatgcctatttagtcccagttttccagcttctatttttttccacataatccctaaccatgataatacaaatataatagaaataattatgtttgtttaaaatatacacagaaccaaatagtcatagagtagtatttcaggtggggggccctcctctagggcagtggagacaatgtcacctgtcgggaacatttggcaatgtctggagacattgttggttgtggtgcggtgacataactattggcatcgagtggatggagggcaggtgtgctactaatcgccctctattgcacagggtggcccttaccacagagaactatgcagctctaaacatgcgcagccccaaggctgagaattgttgatctaggggaagatgtgatttcattcttcatgcttgtaaattattatttaagctgtgaataccctctcttttcccactgaagttgtggttgtaagattctcagagttgagcagactcggcaacattacagaaaaaaaatcaagatgtaaaaaggatttagacgtctggacgtggtggctcatacctgtaatcccagcactttaggaggccgaggcaggtggatcggttgaggtcagagttcaagaccagcctggccaacatggtgaaaccctgtttctactaaaaatataaaaattacctaggcgtggtagtgtgtgcatataatcccagctactctgtaggctgaggcaggaggcagaggttgcggtgagctgagatcgcactacttcattccagcctgggcaacagagagaaactgtgtctcaaaaaataaaataaaataaaatggatttagaaatggtacagtcagaggttaggggtcgggtcaaagcgatccccccagagacctgtggaaagtgtggttctgtctacaagctgcgaccatggtctttactgcttctgcaaatacttgacaaaaagggccacactcttagctggacttttcctccctttcctgaaacaatgcccttcccattgtcaaggcagaagcagcctccactgagaagcgtcagacaccacgtcagtcttgctttccattgctttgctccagtatccatttgaaattcagtgcaaacccataaattccactttgcctctggtagcagcctgcatggtgtgtatattgaacactagaaacacagtaaatccagcccatttattcacattaaccagcaaaggcattctgcatgcccatgtaaatactggaaattactgacatggccttctagaccatgaaaagacagaagcatatggcagaattcatatgtgaacagattgctttttctcataagaacgctttattggaatatcaactattacagctttttgaagttactcttcctgctcttgatttaagtcctgaatcaccccactactctttttttttttccgctgcattctgctatgtatctttacatctgcttcctgcactttctaaatggcctacttaaaccttgaggtaggtccttcagtttcccataaattaataacacatctatgaatatttcccagccagtcttagaagccccagtctattccaataccaggattgtaaacacagggaatagatgaagcaagctgcttctttcaaatgctcttccaatatgaagcaaaatattattgatctagactgcctgctactttcatttaccatgttactrctcgtgggattacaggcacaaaggtttcataaatttcaaatgaaatatgaacatttgktgtcaaagtactgttaaggtatgaaaaccctgctagtattagttcccttttgttattattctattattattattattattgtgtttacatccacaggcaatcacatattttaggttgtggggagcaaagcagcttccccccactttttctctcactccaatttgaatcctcccatatgtccctccctcattttttaagcaggaaacaatgaatgagtttttgctcctcttgccctatttgccgtgtctcttttctgtgattcgggagcacattgatacccttcttttggagcagagaagcttgtctttcatgatagaagtaggtcatgggggcggttagytgacttcatcagagagtagcatgcagatcccacctgtgaggctatggtctgccaaggagagttcagcgggctggatcagagagagcagagccatgctggcaagtcggagtctttgtggaaagcagccaaggtcacagctggaaataaaactgtgtattccaaatcagaggggcaatgcaggaatggatcaaaggaatgaaggatcaagttgtcagccaagagaaccaagagccagacacagggaacctgtgacaaaaacgaaaaccaataaaaacatatattgagcattgaccaggtgcccaatattttaatgtcccatgggtgtgcatcaggtacgctgtggaaggacagatgtcattccttaaaggggctgsactgaattagaccaggggttctcaaagtggggtccctggaccggcagcatcaccatcacctggaaacttgttagagatgcagatcttgggccccgccccagacctcctgaatgtgaatctctggtggggagggagacgaagtgggagcctgtaggctgcagtctgtgttaagctttctgggtgattctgatacacggtcaagtttgagatgtagcaggagaagcaggaaacataggagagaagccactaggggtgggaatcagaaatacggtgtccctgcctacctaggggctacattcctccgggcaagtctttttaactctctctgcctggcaacttccttaacaaagagtgatactaatacctgccttcctgtctttgccacatcacgggattttctacagctcatattggttacagtgatagcagctgagatttaggctgcacctgagtaccaggcagggtcctaagtgacttcagactctatagacagtccctgacttataatggtttgacttagattttttcacctttgggatgctgagaaaaccatacacatccagtagaaaccgaactttacattttgagtttcgatttttttttttcacctgggctagtaatacgtggtaggatactctctcacaatgytaggccacagcagcgagctgcagctyccagtgatcacaagggcaaagaatcgatattctaccaggcacggtgttgcctgataaccttgcccagctgtaggctaatgtaagtgttcttttttatattttctttaatttttttaaatttccacctgttttggggggggtacaggtggtatttggttacatgagtaagttctttactggtgattggcgagactttggtgcacccatcactcgagcagtatacactgcatccagtttgtactcctttatgcctcacccttttaccactctttccctctcagtccccaaagtccattgtatcattcttatgcctttacatcctcatagcttagctcccacttataagtgaaaacacacagtgcttggttttccattcctgagttacttcacttagaataatggtctccagtcccatccaggttgctgaaaatgccatcagttcattccttttcatggctgagtagtattccattgtatatttataccgtagtttctttatccacttgttggtagatggccatttgggctaatttcacatttttgcaattgtgaattgttgtgctgtaaacatgcgtgtgcaagtatgtctttcatataaggacttcttttcctctgggaagatacccattagtgggattgctggatcaaatggtagttctacttttagttcttcaagaactctccacactgttttccatagtggttgtactagtttacattcccaccagcagtgtagaagtgttscctgttcaccgcattcacgccaatatctattattttttgcatttttggtaatggccattcttgcaggagtaagatggtatcgcaaatgcaacaaaaacaaataggtgggacttaattaaactaatcagcttttgcccagcaaaaggaacagtcagcagagtaaacagacaacccgcagagtgggagaaaatctatacaaatctatacgtctatacaaggactaatatccaggatctacatggaactcaaattagmaagaaaaaagctaacaatcccatcaaaaagtgggctaaggacatgaatagacagttctcaaaagaagatacacaaatgaccaccatacgtgaaaaaatgctcaacatcactaatgatcagggaaaggctaatttaagtgttctgaacacatttaaggtaggctcggctaagctatcatgttgagtaggttaggtgtgttaaatgcattttcatcttatggtattttcaactcggtatagggtttaatcccatcctaagttgaggagcatctgtatctgttttggtcctgacaataccccatgaaggaggtgcaattacccctggcttagggttgagaaaactaagaggtttagtaatgtgcttgaggccatgctacctgtaagcaagaatcactccaggtttttcttgtttcaaaactcctgttaacaactgagttgctatactgttttagtaggtcaagatatactatgtgtttcaaagggcttataaattataaatgctacttaaaatgatgtaaagtggtattattgttgtcatcatgtatatattttcaactctctcattggcatcttgaggtttctcttctatgaaattctttgccctaggatggtcccctttgtcaaagagagacacattctgaacaaggtcagacaacacagatggagtttggattcgggcactggtgacagtgaagactcagatgaggttcttgagtactttcaattaggtttaccactgaccccatcagtgtgcagacgaagggagatgagagatacagatggttaatgggatttttgkrgtatcttccagcctttgtgagcacagaggtttcgctacattttgaaaattaaaattcatttcattcgcattacagattttaaatcctagctcctttttaagcttttaattccaacttgcatttcttattattctgtttacaaacctgacaaattttagcagtcgttttgaggagatctagaataatgtttcatctcatttttgaatttaggtacagaccttaaaaatattatgctacatttctaatattaatatcttgctttcttatttaggaacttttcctgacaaacttcccaagaatgtaattttgttatatccatatgataaaccttaagtattcttaagccaggtgcagtggaattcccctgtagtcccatctactaaggagactgaggcaggaggattgcttgaggcctggagatcaaggctgcaatgagctatgactatacctgtgactagccactgcactccagctgggcaacatggtgagaccctgtctctaaaaacaaacaaaccttaagttttcttaatgttctgacacttttataaatgtagtatttcaacttatggtcaccattctgtaatgattatcatttgtacatttaaaatagaaactgttaggccaatgtgttattctagaataggacttgacagactttttttwaaataaaatgccagatagtgtttctagctttgcagttcagatggtgtgtgttacaactgttcagctctaactttgtatgaaagtagccataggcaatacacaaatcaatgcaccatctgtgttccagtaaaactttatttataaaaacaggtcacgggccacatttggcccatcagccatagtttcccaacctctgctttggaaggcctaactcagttaaacattacaagttcatgcagcacggtgtgatggctcacgcctgtgatcctagcacttttggaggctyatgtgggtggatcgcttgagctgaggagtttgagactgggcaacatggtgaagccgtgtttctacaaaaaatacaaaaaaaaaaaaaaattagccaggcgtggtagcttgtgactgtactcccagctacttgggaggctgaagtgggaagatatcctgagcccaggaggcagaggttgcagtgagctgagatcgtgccactgtactcccacatgggtgacagagtgagaccctgtctcaagaaaccgaaaaacgaaagaaaaacaagttcatgagataccacatacgtgaatatatgctaacacagcagcattattttttggttaatcaatgattatcaatgcttctgtgattttaaaaaggagagtcagctattccctcttctgcccgctgatatctacagcctctaccagatggtacctcacttaattgaggtttgccttttttcaggctcttctaatgatcttctggccaactctaaatcacctttaaacttcatggaatttatgcattcttgttaatttatatccatgtaatatcagggtatttctctttgtagctgcatcttctaagataatggtttttcatggagactggcattgtcccgtccctatgagggggacatttgggaatggcatttttagtactcacaaggtaactggggcactcttggtcttggggaggggaggtggctggggacgcagagggtcctgcrgtgggtggatacttacaacatagaaatgtcctggctcttgatgctggctacaccctcagtaagagatactgtcctagggtcatttttttcaacccacactagttacgtggactgtcttagtcagtccaggctgctataacagaataccgttgactgggtggcttgatttttttttttttctcccagttctggaggctggaagtcagatrtcagggcaccagcatggttggtttctggtgagtgctcttttctgcatttgtggacagctgccttcttgctgtgtcctcacttagtagacagagagagagagagagagagagagagagagagagagaccatctctcttgtgtgtctttcattcatgagaactccacctttgtgaccttattacttctgagaggccctacctccaaacaccatcttattgggtgttctagtttaacatatgcatttggaagagagaggaacatattcagtccatagcatgaaccaaccacgtgcacagaggtgtgccccaatttactgtcagtgcagccttcacaggcaggaaacccaccaggtccaaggaaggggcactcagctgttacctcctgtcataggaccattcctcactgtgccatcatattatacttccatatcgtgtgtcttgtggcattcctgggcctrcagtgagcctgtggccacctcatagtcttgttggccacagcctctagaaccagggattggaggaacagccatcgctagcatggtgcttggcactgagcgggtgcttagtgaatatttattgaatgatttccaactaatggaagaaagctgaatagcacaacacccagaggattgaggtttattgaaaaccaacccaaagggctatggtgaaaatcatctcaaaaggcagagggcaagaaattgatatttattgagggctctcagtgggtgttgtagggggaaggaagtacaatgtcctggagctaggctgcctaggtttgaatccagggtctgccagatgtagatgtgtgatcttgggcacgtttttcaacctctctgtgcttaatcttctcctctttaaaggtgggctagtgatagttacctcacaaggtagctgtgagaatgaaataatgatacataaagcacttataacaggacctggcatgcagtgagtatcagtgggtatttgctgtggttatttagttatctactttacatgtacatgtaaagaactagggatatctgtattaagacagggtcttgttatgtttcctgggctgatctcaaactcctaagcttaagtgatcctcttgccttggcctcccatagtgctggcgtttcaggcttgagtcactgttcctggcctacttaccttctttttgatcttctgaagtcaccccctccatctgacaggaggttgaaggtccgatggccacataggtggcagtgctggaatttgaacccaggccttcctcccttacctctctctacctctatctcttctatctacctgtctctactccctctccctacttttctctttttcccagcctccccccgatatactcaacatatatctccctctccctccacccacctgcctcccccacactccttctttccctctcctctgcagggagagcttggaaaccaagagtctatgagctcgaagggagcatgcaaaggtgccaggcaggccctcaaagctgggaagctgcagtaggggttctttgggacccagttaagcagtgggcccttgctctgagatgcagtctgctgagctgccatctggggacacatcttgagtttctctccatgatggcgcagctctcagcgtaaagcagtctatggagtgagaagggaaaaggccccagtaataaaaggcaaaggaagccctggtgaagtgactcatacctgtaatcccagaacactgggaggccgagatgggaggatcatttgagcccaggagttggagactagcctgggctacataaaattatatatatatatatatatatatatatatatatatataaaataatgcagaagttttatatatatataaagttttatatttatatctataaagttatatatatatatatatatatatttatttattttcaagacatggtggcatgcaactgcagtgtcagctactccggaggccgaggcaggagagtcacttaagactgggagctcgaggcggcagtgagcagtgatgactccactatactccagcctgggtgacagagtgagactttgtctcaaaaataaaatataaaataaaataaaaaggaagaaatagccagtagtgctttcttgtagacagagaagctggtgaaatgatgtaaccaggctgggcatggtagctcacgcctgtaattcccagtactttgtgaggctgaggtgggcagatcccatgaggtcaggagtttgagaccagcctggccaacatgataaaaccccatctctactaaaaatacaaaaattagccaggcacagtggctcatgtctgtaatcccaaatgcttgctcgggaggctgaggcaggagaatcacttgaatctggkaggtggaggttgtagtgagctgagattgcaccactgtacttcagcctgggcaacagagcaagactctgtctcaaaaaaaagaacaaaaaaaaaaaaagaaatgatgtaactggtagggagaaagccaaaggttagaaagagaacatgaattgagaatggaaagatcgcagaggaagcagatttgtctgcacacctcttgcatgtgtatttggagaagctctgtgtgctgcgggtcgagggaaacacataactggaacaactgtccttttccaccattgttaaatcctgctttgctcactgcaggagagggggattatataggagcttctggaaacagatgccttgggagctctcctccttttccagaactcccacacttgctcttgtagatcatcataggataactctccgctccctttcctaagaaaattgatctaaaaagtaattatggaatcttgcagtgcttgttgggatcagagaaggctcctccgatgatgggatgttaggtagagggctgcagggaccttgcttttagtcaggaggcaaatcaagagccaagagagggaggggtggtcgtgagtttttatgatgttccttctcttctccgctccttcctgacaagagtctgtctcttttctctgtgtgtcataactacccacattcaccccggcagcccatctaccttgtttctctcataagtcagcttctctcccatctttcctgtgaaaatttctaacaaaatgggagttaaggccgggcatggtggctcctacttgtcattccagcattttgggaggctgaggtgggaggattgcatgagctcaggagttcaagaccagtgtgggtaacatagagactctgtctctacacatttttttttttaattagctggggatggtggcttgcacctgtagctccagctactcagagggaggctgaagcaggaggatcccttgagtccaggagtttgaggctgtagtgagccctggtctcaccactacacttcatcctgggcaacagagtgagatgctgttttgtttttgtttttttttgtttgtttgtttggttttttttggaaaaagaaagaatcaccataaaaaagatgggtaactcrgaaatttcaaatgcttgaatttcttgggttgggaagaatatcccaaaatgtgtttccaactacctcactgattttgacttcacagggagaatattttgatttttatgctctgagttgctggtactgctgtgggcacagaactgggtatgacagaacatttttctgaactatgactctgatcttctcaatctctcagtgggaaagagttttggaacttattatttttaaaaacttggtaaaagatttataccataatatttatcattttaaccatttctcagtgcacaattcagtggcataaaagggcattcctgttgtgcaaccatcacccctatccatctccaagtgaacttgattcttaaatctcccagccatctgtttcaattcactagatgttgttccacccagcacgtcatggtggaaaggggcaggctgtgattttttttttttttaacctccagcagctgtgttccctgtggcaactatgtaacctctctgagcctcaacatctgtctataaaatggaaacagtgcaacctaccttagcatttgatgatctcaacttggatcccatagcgggtatctccaaaatttcctcatcttgactacgttctggtgaaacttaagatgtcagcacatgacctacctcccttcccttctcattcatctgcattttcacaatgcttggttttatcttttatacatataatgcacaatacatgtagtgccaacaagaattatagtttctgtaagtagtgtatgattgcccacggatcttcagtaactcattaggcactgacgggctgacatgagcaacaacgagacttagtatctgttgcagctctccatacagtttacgaaactctaatccataaaagccgtttgaaatttccattaggagatttgcacaagtggttaaaattagtcatgcattcttggtctaaactgcaggaagggtatctttactgtgaaaatgattatgacatgttaaaactgtgtaatagtaagcagacagttttccgagctgctgggtgaattctggaaatgctctattattttctccctgttgactcctttctttcaggcaagacagccagcatgttgacttggaaaacaactgaggctgagcagtttcagagcattgacattacgtggcttcttttgtgggccaccccaactcttttattttttttaattgctgcttcttcctctaaaatacaacttgttttttttttttttaaagaggaggaagccttaaaaaccagcgacagtcttggttttcttaacctgtccgccatttaacatttctagaagtgcaacattgcttctaaggtaagggcaaggaccatgacttttgcatgctgaaaatgagctgcctggtttattgagttagttattcctttttagtgccgcagtgttttcagtgttagagaaaaggctgtgattttctttgatattaaaaagccaaccacttatattttccaaagccatttgcattcagtctgacggccgctaaaaatgtatgtggatttttcatctgagaggttttctctatgcatattgtttacatttatcaaatgttgtcctgcccagtactttatattcattgttgcttccggacctagctgacaacatggtctatatgaaaaacaacacaaaacaacacataagagagtcaaagggacttctttggggagaatataaaaacaagccaaggcgaaagtggctgtaaaaatgcgttgtgttcccaagtggaggctccttctttgttctgtcatcagtttgtcagttgtcaatcaaacctcccttcgcctcacacgtttgctaatgtaagaagtgctggctctgctcttagcctgcagtggtgcagcttaaaaattctgggagggtttcatgcagtaaatacttaaartaacagaaaaggactggggaaaagctgatgttgtagctgtatgatcacccatgtaaaactgtttatttagttatttatttatttatttgcttttttacttccttttctatgcctttggtgactttgtgtaatgctgtatgtaccatcagagcacatactgcttttgtgcacacatacattgaaaacaaaatgaaaaaacaagaataaaacaaaaaccctattcctattcctacaattctggtactttgccacaaggtggtggtagtgtatcttgagtaaggaatatgacctgctagatataagcatctgtttatttacacactaaggaatgtttgagtgtggaacgtggtttagatgctgtgcgtacagcagtgactcagataggtgtgtattctcaagaagctttcattctaatgacacatactttgtctccagtcagagttatggcaggttttttttttttttttttttttgactaaattcacccatatttgatggcaagtgtgatcacagcatgtttataaaaatcattcttaattaaggcatttccatcttatcaagccccctatttaataaggatatcaaaaaagaaaacagttttcgtgcatatgtgtagctttttagattcactttttccttatttgacccatataaactttgtctgtctgtgtctgtcagtctcacacacatccttcaacacatctcttatttctttccagagccaggctaaagcacccttgccatcttctctctctgctgttaaattagatgccttctccaggaatctctctgggggcatcctgagccttcccgattccatttcagatttctttctgtaatcaagagctccatctctgttgctttcctggggctcttcctctcctctttttgaagcttttcatttccctttatattctttcattcgtcaactacaaagaagctgcaggcaggaacaagagagctcagcacacttggtgcagtctctctggcttggtaattggtcccaagaaaatagtttttttccaattatggcaacattgaaaacttatccaggagaggawaggctctttcagctgctctttctcgatccttgcagtttcccttttgacctgtgggtacacatggtactgacgcrattggcacctcagatggttcttcctgacagctacccttgcamctgactcaggatacaaactacctttttttttggagacagatctcactttatcacccagtctggagtgtaattgacgcaatcctggctggctgcagccttgaccttctgggcccaagcagtgttcccgcctcggcctcccaaagtattaggattacaggcatcagccgtcatgcctggcacaaactgcctttggaagtgaatcagtcagttgcctagtaggcctaaggagaccatgatccatgtaaaccatggaatattttaagcagaaaagaacgtattccccttcaaggacaaagtgctggaataattgacatccaggttatcacagagccttcctatagtgttgattctgatcactcaaataatcttagtgttaaagggtttatttttatttttctaccttcttttaccaccccttactcccatcagagcaccatcagtcttttgggaataaaataattcctcagatatattaaaaagctatagaagcagaagttaacgtacatgcaaaaatctctacatttctcaacaattgtgtaaccactaaatatagggaaagaagtgtgcaaggtataagacattggccatgcgtccttgtctgtgccacctcaccaggagcattgctcctttttatgcacaagcatcagaggttctggacatcttcttgggctagttggtatagcttccttctcagctcattctgcaaggtttgctttggaaaagtctgtgcatctgagctctctcttgccatatcaggaaccgaagtcagaaataaaggctacagatgctcaaaatctgcagtattcaatctttttaaggcccagcatggtgtctcatgcctgtaatcccagggctttgggagactaaggcgggtggatcacttgaggtcaggcattcaggactagcctggccaacatggtgaaaccccatctctactaaaaatacaaaaattagcctggtgtggtggtgcacacctgtagtcccagctagttgggaggctgaggcaggagaactgcactctagcctgtgctagagagcgagactctgtctcaaaaatataaataaataaataaataaataaataaataaataaataaataaagtatctgtccccaagtcacaatgctattcggttggtgcaaaagcaatcgtggtttttgccattacttttaatggaatagtaaataacacttgatctttggtcttctgacctgaaatcccatggctaggattgtcagatagaatacaggacacctggcctgttacagtggctcacacttataatcccagcaccttgggaggcagaggcaggaatatcacctgagcccaggaatttgaggctgcagtgagctatgactgcaccattgcattccagccagagtggtagagcaagaccctgtgtcttaaaacaacaaaaacaaaaacaggacacctggttaaatgtgaatttcaggtaaataacatattttttaaaaatgtatcccatgcagtatttggagcatatactctaaaaattttctttgggatatacttctaagaaatgatttgttgtttatgtgaaactcaaattttactcggcatcctgtgtttttatttgctagacgtagcacctacctgtgacatctttttgtttctgccctgctgtgtcacagggtcttggtatctttcctcctgtgattctgacactaccttgggaaatgactctgtatcaagcgtttaccatctgctgaaagctttgcatactctgttgcttatcatgacaactgccctgaaagttgggtgtamttgttacccctttccagattaaaaaacctaggggtcagagaggttaagtaacttgctcaagacctcacagtgaactgtggtggaccactgggattagaacccagtgagttcagtggctttgcctccaagtgcgtttattattgtccgcactccaaaatggctttaaaaaattaaaaagatacatgacgttgaaatcagtgacagaggcataaggctccttgagggaagaaaccaggtgttggccataaaaaaattatttttcacagcgcycagcaaagggcttgtatgcaaaggaccctcagtataagctggttgttgactgatgtgtttcaagagtaagtcagaaaaataaaaagaaggcagggaaagagttcaaaactcagtgtcacttgcacatccattttgccctagaagtgttttaaattttatcaggctcataaactatgtttcgaaacgtgaaaataaattggccccctgaccccttatgaagtgacatcattcatctgaaaggtttatcgccctgcgtgtcattttgaagttccctactctcctcctcgttctctaaatccatgaaaaaatagaaatgggaggaagaactggagagaggggttctgtgtgtgtggaatgtggctctggaaagcccccagccctcctgttaacacaatgcttttatcccgtaatctctgcctgcgggagacaaaataacagttcatctggaaaacaagattaactcatttaacttacgtagtgatcacagagagaagcttgttggagttgtctggctgaaggaaagcccgcgattctcggccattccggttcacagggcctgggtagcgggcccagcctgttgcaagtaatcgggctctgtcagatcagccttggtgagattgggatattaccagggtattctgttcatctctgacacaggccctctcaatctgatagacggtgtgcctcttctcttcattagaacatcttcctgaacacttgcctgtctgcactgccctgctaaggggttttcaggtgagcgtgctgtgggtaccttcacatttcaggccttttaacagggaatgaaaaccaactgccctgtgattccaagtctgctgatgcatgtgaaattggctttgtgttggggcctcttcttccaaagcaacagtaagcattttttttttttttgtgataatctctctctgtcacccacgctggagtgcagtggtgtgatctcagctcactgcaacctccgtcttctgggttcaagtgattctcctgcctgagcctcccgagtaactgggattacaggcacccgccacccgacgcccagctaatttttgtatttttggtagagatggggtttcaccatgttgcccaggatggtcttgaacccctgatctcaggtgttccaccctccttgtcctcccaaagtgttgggattacaggcgtcagccaccgcccccggccgatagttgcctttcttaccagcctgggccaggagcagttgtttattttctgctatttcgtgtgtttctttttgctggcagtgacatactcctacagggatgtctgcctcatgttgacctgcttgtgtttaccacctagaggcctaagaacaggctttccccgttcaaatcacccagtggcgtgcacacttggggcacctggggactggtttcctgaatggcattgagagtcattactttccacacacagttaactgcagggagatttgtctctgaaagtagtcttcaagaaatgcggcagctgcttctagccgctccatccttccttttcccagtgcgcactaaccctccagagccttccgcatctgctatgcagcattggccacrccagtgggatgcaagaatttatcccttctgttgatgcaattaaagctaatggatctcatatatatatatatatatatatatatttatataaatatattttatatttaaaaatatttatattttatatatttttatatatttatgcaagtatatatctaaatatataaaatakatataaatatatacatatatgtgtatatatagattttgttttttgagacagggtcttgctctgtcactcaggctggagtgcagtggcgtgatcatggctcacygtagcctcaacctcctgggctcaactgattctctcatcttagcctcctgagtggctgggaccgcaggttcatgctaccgtgcccagctaattgtttaattytttgtagagataggatctctccctttgtggcccaggctgatctcaaactcctgagctcaagcgatcctactcactcggcctcccaaagtgctgggattacaggtgtgagccaccatgccaaagcctaagggaccttagaattttttctcctttcttttcacattttgttttgtgcttgcttatttattgaaatctggaccacaaataacttacatgtttgtcaaggccagatttcaggacctaaccaacacccgacaggcatcttagaaagtggagggtgtaagttataaagagagattacttccaacacgtttctttaaagcctgctggctaaattaggtgggrccttmtttgtgtcctctctgttcttgctagtctggcctttgtataatagggaagcagatatatctggaagcctctaagtgtgcatcatggaaattgtttgaaatgttcaaagtgatgtggatgtatatatacgttaaaaaatatcactttcccttttgaagacatttactatttctatggtttgtttagcaacagcctggctgaatagttcttcaaaaaataggaacatgatgctcatatctggccactgtatatgctttggagggaacttgaagactaggtggctgcagccactcagaatcttgttgaatatttaacatttttttgtgaatgtatcaactaagaagactatcaattttagagcatacagctgttctagaataatagtttgaaaggccagccgcaaagattgtggtgattaaagtgtgagcagatgacggaatgataaaccttaacgcttaaaaatgtgtttttatagtgccattcctatataacatcgtctgataaatgtatttgagacgaacaggccaaatgaaagaaccttccataaggggaygcagcacagtttgaatataagtgttccctccaattcccatgttagtgctttactatgagtattgaccagtgttaaagagtgagcgcacaggagccttctcaaagcctcctgcacacactctcccactgtaaatgcacgagtattgatcacaattattccgtaaacacatcttacaaattccctcagtgcacgcgccatctaaattaatccaaattcagaacaaasctctcttggaaaaggaaagagcatctctttcaggagcttccctcttggacattaaatcttccataatctgtgctagttcggcaaagaagccccaacgtcctcccaatcatagggcgcctgagctcttggtctcctatatcttatattcattatagatgtcttatatccattcctgtatcctttgtgatgtcttgagtgagaaaatgctctgaccaataagccaatgttcaattgacttcgaaatgttatgtgggataggctcattcagggtggtacggctgtagacaaaatgctatatgcattggctgggcgcggtggctcacacctgtaatcccagcactttgggaggccgaggtgggcagatcatgaggtcaagagatcgaaaccatcctggccaacctggtgaaactctgtctctactaaaaatacaaaaattagctgggcatagtgttgtgtgcctgtaggcctagttacttgggaggctgaggcgggagaatcgcttgaacccaggaggcggaggttgcagtcagccgagattataccactgcactccagcctggtgacagagtgagactccatcttaaaaaaaaaaaaaagtcttatattgattaaaagagacttaagacacatagtaccagatggattgtgtgatgctcattttgatttggatttaggggaacctgctctcaaagacatttttctgagacaaataggaaaatttgaatatggagtagctaatagatagtattaagagagtagccttcattttttaaagtataataatattttaattgagtttatgttagagatgcataccgaaaaatctacaagtgaaatgatatgataactaagacttgctttaaaataatgcggaaaaaactgttagagtaatagcgtaaataattcaagattggaaaatgttcatgttaaattattgttggccgactgtgggttcatttaattaggttctctgttttggggtatgttgaaaatttttcataakaaaatattattcagaggtctcaagaggcaggctgccaagaatagcagttagaaatagctagtatcaggcctggtgtagtggctcatgcctgtaatcccagtgctttgacaggctgagggaggagaaytgcttgagcccaggagatcgagaccagccagggtaacatagggagaccctcatctctacaccgaatttaaaaacttagctgggcatggtggtgcctacctgtggtcccagctgcttgggaggttgaggcaggaggattgcctgagcctggtagaggtggaggctgcagtgagctgtgattgtgccactgcacttyagcctgggtgacaaagtgagactctgtctcaaaaaaaaaaaaaaaaaaaaaaaaaaaagctagtagcacaccccaaaacttctagacagggcatggtgtgagctggartagacaactagttcatggtaacaggaccagcagagctccgtcttgatgctgttattatttggtatctgttaggagctgaattatgtgtccccaaaattcatgtgatgaagccctaattcacagtacctcataatgttactctatttggagatacarccttttaaaggatggttaagttaaaatgaggttgcttggatggtccctaattcagtttaatttgggtccttataaaaagaggaaatttggatgcacagagacaccaggaattcatatgcatggaggaaagaccacagtggcaaaagacacattgaggaggtggctgtctgcaagccaaggcaaggggcctccggagaagccaaacctgctgacaccttgaccttgaatgtgcagccttcagaactgtgagaaaatcaatttctgttgtttaagccacctagtctgtcrcattttcttatggcaacccctgtagataatacagtcccattctctggggaaacagatacctccgccagggtcctgatctgaatatgatttggggtgatggaacagaaacacccgaggastgtcgttggggaacaggaaacctgtctgtagtcctggctctgtctccaattggctacgagggcttgtgtgtactctagttctctttccgtgacactgcatttggggggaaggtaagggaactggggaaaagaaggcaaaatgatgacttaaagagactgatgaacccaaagctctcttgtgaagccccttctagaataagtccgtctcacgttacagtgcttaggaagtgttagatgtactgtcatttcttcaacatatatgtcctatattagtctattctcacactgcwagtgaagacatacctgagatggggtaatttgtaaaagaaagaagtttaacggactcatagttgcacatggctggggaggccacacgatcatggcggaaggcaaaggaggagcaaaggggcgtcttacatggtggcaggcaagagagcctttgcaagggaactgccctttataaaaccatcagatctcgtgagacttattcactgtcacgagaacagcatgggaaagacctgcccccatgattcagttacctcccaccgagtccctcccatgatacgtggggatgatgggagatacaattcaagatgagattttggtggggacacagacacaccatatcatgtcttggcagccatctatattcaagacactattctaggtatgacataaaggatggcaaaaagtcagttacttaaaagtgtggaagcagagtgtcccaggcggaggaaacggtaaatgagacctctggtagtaagaagcagtgtagcatgtttgagacactgaagtccaatggaacttgggcggaataaatgaagggaagattcaaggtgaaggctgagaggtgtgcatgggtctgatcacacagagccttgtaaaccaaggtgaggacttaagattttattctagctgcagtgaggaaccagtgagtggttttaagccagagagagattgataagacatggaatgatatggtgtgatatatgaaatgacatgtttgaaatgatagatgacgtgattgtgatataatatsatgcggctgaggacaacactataactgctcggtagagaatggattgtcatggcctgggtgtggtggctcataatcccagcactttgagagctccaggtgggatgattgcttgagcccaggaatttgagaccaacctgggccacatagtgagaccccatctctattaagaaaaaagagaatggattgtgatgaattaggattggaaacacagagatcagttagaagatttatcagtgagaaaagagttcagttgcaagttaaagaaaacacaagtaaagctaactgtaacacacagagctttgtcttttcttgctgaataagaagctgagagggaggcaattgctgtcactggtccagccggctcagcaactgcacatttgtcaaagttcttcatccccagctttgtgattctctaggttattcattcttctgggatcgtagatggccaccacaggttcactgtggaaagaggggtaggaatttttaccagctgggtctgactccaccccacccccacccctacccaccgttttttgtttttgttttttaagatgaagcctcactctgttgtccaggctggagtgcagtggtgtgatcttgactcattgcaacctccgcctcttgggttcaagcgattctcctgcctcagccgagtagctgggattacaggcacatgccaccacacccagctttttgtatttttaatagagacaggatttcactatgttggccaggctggtctcgaactcctgacttcaggtggtctatccaccttggcctccccaaattctgggattacaggcatgagccaccgtgcccagccgtgtctgaccattttatcaggaaaagcaaaagcttttctagaatctatcaactcccttctgcatgtgtctatttggcatgggctgtgtcacatgacccctgagctgcaaggaatgctgggatacgatggaagcctgccagaggtagagccttgggaagggctgatagggcctctaacctaaatgtccaccaccagaggtattacagaggtttgagcaagaaattatggtggtcccagggatgatgcattctgataatcattatcatcaagaggaatgtctaaaggaaaggggaaaaaaaaaatcagacagtcacattgaaatgaggtccttaagataggccctaatccaatatgcacataaaggggaattttgggcacagagacagaggcagagatagagggaagatgatgtgaagaaaaacatagggccgtgtagaggcagaggcagagattgaaattgtgctatcatgaacgggggaatgtctgggactgccagaagctcctgaaggcaggaagcatcctcccctccagcctttggagggaatgtggccctgttgacaccttgatttcagacttctgggttccgcaactgcaaaagagtacattgctgttctaagccacccagtgtgcagtagctttctgcagcaaccctagggatgaatgctcctgccaaatgctgcctgcccttcaagatgagtgttatttggcagaggaagatgatgcactgcttattttaggggatgccctcacttttgggtccctatgtcacctgtgtgtactccatgccrgtgtcttcccagcccctgccaggcaagttcgtgtggttctgtgataaccctcatctctataggttctgtgataacgctcctctcactgtgctgctccttgggtgacatcacacccaaggagaatcatgggaccacctccagagagattttcttagaggtgtggaacagaaaaaaaagcgtctctattcgaattgcaggatcttccttatagtcctggagaaacgtggcccagcattgtcttggtccatagcctgagcttaccctccctacgcaaccacagctgtgtgcagcttcagccaggtttgctttacctgatctcactggcttcatgtttattatcttattttcagtttcaaaagggcatatcctgccccctttcccaagatcagaggataaggaatgtcttgatgttctcagtcgtaaaattaggctaataacacctcccatggttgtctgtgaggacaacagaaagtaatgttttctctgaaaagtttaaaagggtaaatggcttcatcacatggtgatgacagtgattattccaagagatggctgtaagctccctgagaacagaggtgctctgtgtaaatctagtctgtctccccaggcttagtggttgacctagactataccaagagtaagtgtgttttttaaatttaatttaaatcaattcattaagcattgctaaattggaaaaccatggaatatagagatccagtagttaagagcctactgggagagacagcataataattacaataagtgcagaacttgmaataatgtaattgaaataatgtaatacaatcctgcttaatattacactgtatatattcattgacttatagactgagctccttatcttgttcattgcyatggctttagcaccttttgaacagtggtgcttggcttttggtaggtggtcaacaaatgtgtattaagtatatgaactgttggaagggtctgctgtgaaggatgtgatttgctctctttgatggtggacaaagaaggtttcctggtggaagagattaatgagttgggttttgatgaatgaataggagtttccccagacacacggaggagacagaatggaatgaaagaggggttttccaagaagaggcactgaagggcaagacttcattgcttctttgatactccaatgccggcttcctttgggttggactctgatggatctaatcgaggattaggatggaggtaggtgggaacatatttagaaggatgccctgtggtttttctccttcctgctatttatatttcyctctctgtctttcccacctgtttggtgatgaggaaggagctgtgtactggtttgaaacctattcacgacatagtggacccaacaccaagtgtcttattgtaaatggatccacttttactacagttactttaatggcatctaaatgataaatgttaataagcatttttgcttgggaaagcacaatggtattagcctgccagactgcaaacgttatttgctttatggaaggggatttcaaacaaggggttctggtggttgtatttttgcctcaacggttatttatagagaaagtatgggccattgcatgtttatagtatctcttttttatggctgcccaagttattattttttattggtttgggtacttaatttgcacatttgtaaacaattatgtagttacacagctgttgtaccacagagaccatatgcatttccatgttaagagaaaagtccgtgagggattctcactggataccatcataaaagaattattgtggtgccaaaaaaatttaaaaaaacgactagctcagaagttatcattgtgtttttatagtatttggagttaaataaatttaatgtttttttgctcacttgagttggagccaaactttataactgaataggagggttctctttcccatatttgagtagaacacatgatgttcaataaaaatgaatttgccagtcagaaaaatttatcttttagaaaattaatacactgagccaagcatgggtggtccatgcctctaatcctaggtactctggagggtgacggtgggaggatcccttgagcccaggattttgaggctaccctgagctatgatcacaccacagcactccagcctggccaacatagtgagacactacctagatagcttaggagagttccaatgtttctgaaggatgtttttttaaaagaartattcatttaggtgacacatatttattgagacactaatatatgccaggaattattctattggtkcctttggaggagacatgaataaaggcatggatgtgactgaggaggtaaaggtgaagaattggggaggggtggatggggctgactcatgacctaaagaacatggcatctggrgctctyttgaaataatctgcactaaccactcattcacatttttttgagtctgtaagatcccaggcactcttggtagcaggggggttaggtgggtgaagggacaagtagaacttagttccaacagagctaaagggtattggtgaagactatgagcccctcatgacgcacaactggtttcaaatccaagcccatcatgtatcatctgtgtgattgtgggtgatctctttcttcccaaagcctgttttcttgcctgaacctgatcaacagaaacagtcagtgcaggtaatgtgtttagcacacagcctggcatacgaacttccacacaaaacgggtgaccatggctgaagggttattctggggagccttccctgtggaagccccattaaccatccctgctcattcctcccgtgagaccaccatttgctaaatcttctrtcaggtgatgtgggatccaagaagaaacaataatcagaagcttgccttacaggcatgcacaatttcgggtggactgtcacatgtgcactgaaaaagtcgagaaatgttatgatggccctggaaggaggagtgtctagatgaaatgcgaataaataggagacaagtgtgtcgttaattaagaaggagaagggggactttaaggttaccttaaaagaaaagagacccctcaatgctttggaagagcctttttaataagctagtcaggtaagttagattgctctgtcttacactggtttagtaattttcatatatacttatttcctctgaaatgtattagtaacatttgtaatttaccaaatggaaaatatcacttaactttaagcttcatcaagttaagaatgaatttgtaaccaggggtattatgttttctcttattataacaaacaccaatcaaaaacaaacaaatacatgacgggaaagaaagaaaacccagcatttattggcagtatttttctgcaaaatattatttgtttccctttgcagttttattcattttaagcacgttttcaccaaagtgttctattctaagctagtctcaattcaatttaaagtggaaggtttttttcagtttagataatttacatataaaagcgttactgtacattttatgaaatgactgttttcagaaaacaacgatttcaatttaatcgtattgttattctgcaagttgaaatgcctcactcttgcttcttggtcttactgacaatattccttcttgccctaattttaaatggtgagtgtttgaaaattgatgtgcttcttttagaccctaccagtaagacttaaggcccactgtgattcgtctgatagacttgaagattatgtgcgcgtgtgtgaaacaagggaatcttaatcatctgaacctgacggttatatagatctttctgaattatttttctttcttttcacaagaaagaattatttttctttcttttcacaagaaattttgcttgccaatggtcagatctgttaacacgaaaactaaaaacttatacatcattttatattttgaaattcccaatttgcaatgttatttttttttcttctttttttttttatgacacttttcttcyggaaaaaatccttaggacccagttactctctttcaggattttatatcataatgtgtctgtgagagacagagccagatgttcaggatttcagaccaccatatttgtcctaggaaacctgccagcatttcacattcttgacccttgaattgaatatgaggctctgactatataacagaaaacacccgagttttatgattctgcaagcgtggtttacactataaatttccaccggtctctgcttgtctcttctagaatttagggttattctcaaactctattatacaagcagtgcccaagtgccttcctccaaaagtacattagatactttcttggggagagaagaaattagacaggagctacaaagatggattaaaattaatttggtcctaactaaaagataagttcctcccccatcctcaggatgaaaccaagagcacttctccatcatcaggggagccaagtggacgctaatcaccaccgtgcctggagagttgcctttcagctggtgaatttactattgccaactcctgcattcttattagtctataagattgaggtcgtttattggtgatcacttgtagatatatatttatataaatctcttagcccagaatctccataaactgtttttcatgatgtggataccacgtgggatatgtcccacaattggcaagtgccataaatatattataggccattatactttctacagtatctttaattgatatgccccatgtctaagaaaaaaagtagyttttcatgatgaaggtgatgaactacttctttccattattctatttcccccttttcttcttcaggctttaaagatatcataataccatttacatttactgtttaatttttaggtctgtatttaaaaatctgtgtagtgacaacaattattcttattgtatgaacatattgtcggctggagagtattcagctgtcagacamagtgttctctaaagtgttcagccatcagacagaaactctattgctggtggcggggttgtgggctgggggaaccagagtatttgctcttctttagaagtcatcaatggtaagcctagggcagcctgaaccacttgtgttagaaatattttttataaagcaggacatgtgctttgaaatttgattcstccgtcactggctgtgtgaccttaaagaaataaattgacctgcctgagcctctcggaaatattggctggccagtagcatcctcacagagtttttctgggaatcgaatgagagattacatacacagggccaggtacatagcaggtgctccgaagatacccccgacttcctttcctacgaataaagaggcccaactttttgtccatatgaagaggttggcagagcaaacgcacacgtgcgtaggagctggaattgtcgataatgtcacaatctcaggaaacccaactttgtaaatgtgactttcctttgctactttttgcctattaagcagccatgtatgtaaagtattaaattagcatccaggcactttctttttttctagaaggtggtattttgcatattaatacttgcttaaatcaagaagctaagactttgtattatattttgctttacgtgccttgattaaggtcatgaycctgacattccagtcccaaaggagaccaaggaaatgaccagcacgtggctcactccctgtctgtccagtagaggacaccaaggcacgatgaccgcagctcctgtagtagttatggtcactgactcygggttcagacggacttggggttcagtcctagctctggcgcttaccagttttctcaagtgactttgrgcatctttactcaaggctcttggtctcagttttctcatctgtaaaatggagatcgcagtatctaactcatgggtgtgtttaaggattcagtgatggagaaaatagctgaaaagtgaccgtatgaaatragcagcagttgtcaagtacttggcatagttcctgtcacataggaagcatccagtaagtagtggtatctgttgtgattatgatcatattttatttcatggagttcagtaagagtacaaagcgaggagtttttctgcccctccagtagctgtagaatttgtgtgatgactatgtgagcttatcccctggtaggtataatggaaagactaacaagagtagaagagggatgtaactggagcatgatttaaaggaactgtagtttgtctctgtttttttttttttttttttttttcctctaaataaacaaaggaatagaagatcctgtgaagagctgggtgtggtggctcatggctgtaatctcascactttaggaggccaaggcaggaggattgcttgagcccagtagttcaagatcagtctgggcaacataatgaaaacctaatgtctacaaaaagtataaaaattagccaggcgcagtggctcacgcctgtagccccacctacttgggaggctgaggcaggaagattgcttgagcccaggagttagaggctgcagtgagccatgatcacactggagcactccagcctgggtgacagagcaagattttgtctcaaaaaagaaaatgatgtgaggaagccaggaatgatgagtacctggattaaactaccttaaggctgattgagtaaaagtgaaagatcatcccgtcaactgctggcctgccrcttgtgttcgttaatagaacatttccctctgattgtcaggctttcttagcagctacagaatacttattttcttctttatattataagtttatgccactgcaacattttagaatcacctgggaagcttttgaaaactcccagcatcatgaagcatggtctcttgccttggrgtcagtgtctgtcaayrtggcttttgctaaagagccttcccctatgagaagtgaggcaggagaaggcggagtgaccacaagatgccctgatggtgccaagctattattataaatgaactgaagccacaacagaagtctgctaccttgttcttatctgcatgtttctctctttccagcctcatcttctactaccttcttctactcccacacttcttctaccttgattcccagccttcttttctcttttcttttcttttcttttcttttcttttccttttcttttcttttcttttcttttttcttttcttttcttttctacctctcgggattctgagagcatcctgtaatgttggaaagctttctgctaatccgggcattggagtgctctctgggttcactcctgacagttctttattgctttcccacctctgccaaggtcaaaaatggaacttgcttcttgttctcgtatcactcagactaagcagttgatgtaacagataacccccaaatttcagtgatttcacatttaatctgtaaaaaatgaggatttgtttrtagccccaaagacagtctagtttggattatttgaggacctagacttcacctgcacagtggtttcaccatccatccccccatggcctccatggtaccctctgattcaggctcagcaggagcgggagaggatgcataggactacatgttttctgggccaggactggaagcagcatatctcagatccaacctctttmccttggcaaaaattcaggatgtgcaggacgaggaggaaaatgggagtagtgactatttagccagtctttgccacatcccggttcatatctcactccgtcatttataacctgtaattaaatctttagtgagtacctgtcacaggttgagcagtcttctagggcctctggttaccagcaatgaaaaaagccccatttggtaaaatacagtagttggattcattatctctgtgattaacttgcataaaaaagagacagttttcattgatgtgacctttagcaacaactcctaaaatattttttttccttcattcctgcttttccttgttccagaagaagttaaggtaaatggcttttagcacattgcacccccagcttttagcacattgcattatcattataataaatgtttacggttactgatattattwtagttctttatcgacattattacagtccattatttacagtccttatgttatttaggaggggaatttggggacattgacccacttatgtgtagtcccctagtgaaatgacaagaatccccagagctgggaaaacatttccatgcaattmcctctcagtttacatcaaaatcakctcgtcacccttgagattgaagctcgcactctgtaagctctgaataaatattaaccatctcctgaaccytgaaggagacattttctggggagcagtgatttgatgatttgatgaagttgtgtgtgtgtgtgtagtttttcagacatatctccatctgattcttacctctaagagttcctcaagggcaattgtgttgctttgtttttccttgcatctctggaggctgagcacctagtagtgattccaggtacgtagcaggtattttacaggtgcttgttgcattaatgcactttattggtgatatggtttggctgtgtccccacccaaatctcatcttgaattgtagctcccataattcccatatgttgtgggagggaccgggtgggasaatattgaatcatgggggtggttcccccatactgttcttggggtagtgaatgaatctcatgagatctgatggttttataagggggaaacacctttcacttggctctcattttctcttgcctactgccatgtatgatgtgcctttcgctttgcactatgattgtgaggtctccccagccacgtgaaattgtgagtccattcaacttctttttctttataaattacccagtctcaggtatgtctttttttttccttttttcttttcttttcttttcttttttttttttttttttttgagatggagtttcactcttgttgcctaggctggagtgcagtggtgcaatctgggctccctgcaaactccacttcccggatttaagcgattctcctgcctcagcctcccaggtagctgggattataggcatctgccaccatgcacggctaattttgtatttttagtagaaatggggtttcaccatgttggtcacggtggtctcaaaatcctgacctcaggcgatctacccgcctcagcctcccaaagtcaggtgtgtctttatcagcagcattaaaacaaagtaataaaattggtttcttagggttggatggcttaaaacaacagaaatrtatcatctcacagttctgaaagtgagaagtccaaaatcaaggtgtcagcacagccacgttctttctgaaggctccagggatgatctactccatgcctttgtcttagcttttggcattgcgggcggtgcttggtgttccttggcttgtaggtgcatcactccaatctgcctttgtcgctgcatgtcattcacattgggtctctctgtctctactccttttcttctcttttttctcctttccttttctttcctcttcccttttcctttcttttcttctcctcctccttctccttctcctccttctccttcttcttctctttgttctccttctagttctcctcctttcttctttcttacttttactcctccctgcttcccttccctccctccctcttcctccctcnnnnnnnnnnnnnnnnnnnnccctcttcctccctccctccctccctccctccctctctccctccctctctccctctctctttttctctttctctctttctctttctgtgtctctcttttctctctctctctctttccttccttccttccttcttttcttccttccttccttttttcttcttttttttggaaacagtcttgctctgtcacccaggttacagtgcagtggcatgatcacggttcactgcagcctcaacctcctggggtcaagtgatcttccccacctcagcctcccgggtagctgggaccacaggtatgcaccaccacacgtggcgtatttttaaattatttgtggagacggggcggggaggtctccctgtgttggccaggctggtttcaagctcctggcctcaagggattctcctccctcagccttccaaagtgttaagattacaggcatgaaccactgcacccagcctatcttaattcaatacacagtagtgctttttgttcccccatgggatagtaggtaaattaatggaggaagggagtcaactaaacaatttatttgagcaattaatggaggaagggagtcaactaaacartttattagggctttatktaaagccctagggttagttggttggttggttttgttttgttttgttcctttttttttttgccaggggatgctgtggttgaatttccctctgtggtgagagttgcatggggcaatgaggaggtagtccagaatagttctatggaaataggaggctttcagtttcttcatctgtacaatgagagttgaggggagctgagtcgggagttgaaatggtcactgggtatcatttccgtgggtggctctaacctgttagggctgtctgcacagtgctgagcttttgtgtttttggtcatcccaatgtgcttttcctttttcctgagagcagccctctacatcttccgtggtgtaagttgccttattccagcacgtggcatcgccagtcccagtgcccttggcagaccatgcagaatgcatccatggaatatgaaaaatgaggcccagtggggcacagtggctcacacctataatgccagcactttgggaggccaaggtgggcagatcacttgaggtcaggagtttgagaccagcctggccaacatggtgaaaccctgtctctactagaaatacaaaaattagctgggtttggtgacaaacgcatgtaatcccagctgctagggaggctgaggcaggagaatcacttcaacccggaaggcggaggttkcagtgagctgagatccagcctgggtgacagagcaagactycatctcaaagcraaacaaaacaaatgagggtcctcatcagcgtgcctttgacactgtcctctggtcctggtgatctgaatacatcaccrcagaactgccagggtacgtgtttcctagcccatagcgagtcccagtgaaagcagagatgagaaagaaaggagggacacaaggtctgggtcctgagttccagtccgtgggggccctggtgctactgctgtagttcatgaaacattcccttcgattctttgaactctctcatacctttcccttaaattcttctttttcscttatgtcaagcttctttcagtaacaacwgaaaggctaatagtagtgctgtgtggggaggactttggacttggggattggactccatgggagaggtcagctccttgtctccctggtggtgagacagggaatggtagagtgtgtcctacctrtgtgcctgccttgctctacatcagtgcttcttggatattttggtatcaggactctaaactcttagtagttatccaggacccaaaatagcatttgtttatctgggtcatttttactgatatttatcatactagaaattaaaatagaaatagtcaaattctttattaattcgtttataagtaagaaacctattacaagtgaacatagataactcccttcctctttcctctctccctccttcctttttttttttttttttttttttttttgagaaagggtctcactgtgtcacccaagctggagtgcagtggcccagtcacaggttactgcagccttaacctcctgggttcaagtgattctcctgcctcagcctcctgagtagctgtgactacggacacatgccactacacctagttgatttttgtattttttgtagagatggggtcccactgtgttgcccaagctggtctcaaactgaactcctgagctcaagcgattctcccgccttggcctcccaaagtgctaggatgatgataggcaggagccaccacacctggccatggataacatttctataaaatataaccatattttcaaacaaagagaaaagtggcgttgtgctacatttcttctccagtgcttggttccctagaagacagccagattctcacttcttttcctgcattcagtctcttgtgatatcacatggcatgtggcctctgaaaaactccgctgtctagttgtaaaagaatacaagtaagtagtcaagtgacaccttagcattctgatgaaaagagctttgacctcacagagcttctggaagggtctcagagacatccstgagggtcccttgactgcactttgacaaccacaggtctacatgatctgtatagccttttccagttttcacatcctatgattccaagagggaaaacaatcttccttgtaaagagagttaagtgacattgtgtccttgtctacactcagctgctaatatgctatgggacctcaggtatgtcacttaaaccttgtgttggagtttcctccttgttacatggaggtcacaagaataacaaactatgcatagatcacctaatttagtcattccaackgtgtggagagatagaggattaggatggactttatttcctaagtgagaaacgttggctttagtaaaagtgtagtggtttgtagggtcatccccctaaagatatcccgccccaccaaagatatccctaaagacatcctgctggtttcagtggctcatgcctgcawtcccagcactttgggaggctgaggcaggyggatcacttgagctcaggaattygagaccagcctggccaacatggtgaaaccttatccgtaaaaaaaataaaaaattagccagacatcgtggtgcatgcctsttgtcccagctatttgggaggctgaggtgggaggattgcttaagcctgggagattgaggctgtagtgagctatgattgcaccactgcactccagcctgggcagcagagcaagaccctgcctcaaaaaaaaaaagtaaaaataaaaataaaataaatatatatatgcatgcacatcctaattcctgtaacacgtggatatgcccttacttggaaaaagtgcctttgtagaatgcaagcatccttatggaagaaggtcagagggagatttgagaaagacagaagaggaggagtccatgcaaagataaaggcagagggtgaagttgtgcatccacaagctcagatatgcctggagccatcaggtgctggaagagatactggaagatctcttccagggcctctggaggaagcacagtcctgctaactcttaatttgggacttctggcttccggaactgcaaaagaacaagtttctgttgtgtgtaggcacccagtttgtggtaatttgttacagcagacatagcaaactaatgcaaatgggctttgcttgaagtccctcagctgctaagggtcagaaacaggatttgaacctacagttttgaggcctgaacctgctatgcagtgctttcttcctgatagtgaaaccactgtggtcccaaacccacagggctctatttagatttaaacaagactatgaatgtaaacagacacagtgcaatgccagatccagagcaatcgaaggtcatagtttcctcatccctcgaagctgccaccttgcaacatcatccttgtgttacttccagttgtttcttatgataagtaacagtgactttgatatatccattttttagttgtgtacatggtggtgatggtgttttactccttgctataaacgcttaaggattccttagctttagggaatgaaactacttgggcaagaatataaaattttgttctattttattttaaagctctggttacatatggtcaagttgcttcccaaaaagcgtctctgtcaggatgatcttatgaacgacsttagtacctcaattttactgtcccatccttttttcctccttccttgcctccttccctctctgcctccttccttttcttcccatttccttccttccagcattatcatataagccacgtgctgggatgtaccaggcacactagctctataggtaagatatttcctaggactcatcattcacatgagtccaggagaaatacatcttttgtttgtttgtttgttttttgagacagagtcttgctcaggctggagtgcgatggcaccatctgagctcactgcagcctcaaccgcctggtctcaaatgatccacccaacctagcctcctaagtagctgggaccacaggtgcatgccaccacgcccggcaatttttttttttttttttttttaagtagagacagggtcttgctgtgttgcccgggatggtcttgaactcctgggctcaagcgatactccctccttatcctcccaaagtgctgggattacaggtataaaccaccaacccagcctcaggagaaataaatcttttaggaaaaaaaagtgacacagttttctcttgtggcttatcacttggaatgtggagagtcatttccattagggaaccaccaggaatcttggcaacttagcagccacaggagatgcagaaactgagtagtgatttaaaaattcagatcactttgtttgttcccctagaataatacattattatcattaacaaagtaactcaacttacagtatcaaatcaactgcagagccattgatattgatgttaccgtactatccaacacattatgtttagtgttgatttaagaaaatgttgattttatttgatgtcatgggtgggaaattgcttgcttttgttttttgagtgaatctggtttaactgggctgtgtaagccaaggagttctaactcttcttgggcaactgagaccgtggctaatatttcattatctgtattaattaaagacagggcctggtacttgacatggcagtgtgatgtgtccaaggttagacccgaggtaagaatttagagcacagaggcacgctcacatgaagctgccaattcctctgctttttcaggtagaggctgaatgatttccgcacctttttatagattgcatgacttcaaagatgcacactaatactacggctccttgggaaatctttctgcactgatccctttgaatcttcagtgtttcaacatagacttgttacaaagagaaggaatataagcctctgttctttcttgtttccctttgttaattcctttttcctttcrttccttcttatctatccctttcttaccttctttatttcctcgtttatttgggctttttcggttgtgaagatcagtaccttgaaattcagaatagatggcatgaagcacttcagctttgcattcaagtactcatgtgtatgatcaagcatcgtcatgatcattattgactggaaagcctgtaagaagaagcggataaggccagggtgcagactgggcagtagttccctgtcatgaatccactctgcagttgttttataacatgcaacaaaaactaaagtctaatagcactccccaatgccaattttttttctttctcttttttttttttttttttgagagacagggtcttgctttatagcccaagctggagtgcagtggtgccttcacagctctttgcagccttgaactctgggctcaattgatcctcctgcctcagccatctgagtagttgggacaacaggtatgcactaccatgcccagtgaatttaaaaaaacaaacaaacaaaacactttttgtagagaaagggtcttgctatgttggtgaggctagtctcaaactcatgccctcaaatgatcctcctgccgtggtctccaaaagtgctgggattacaggtgtgagcccccaaccccaaaacttgaatctgggccacctttactgacttacttattactatgtagaatatggtacaggtgacgctgcagactcttgaagttaggtcataaaagatgatcctgcttccgtctggttgtgtctctcactcatgggatgcttaccctcaaaatttggccaccatgccatgaggaaactcaatctagcgtaggtaggaagaccgtgagaggcccaaatagagaggaattgaggccgccagtcatagtcagcttcagtcatcagataggaagccaacaactgagccctcagatgattccagtttccaaacactgtgaagcagaggctgactgtcccctttgtgccatattcaaattgctgacccacagaattcatgaatagcgcatgtggtagatttacacttcaaagtctttgggtaatttgataaagatgtggtaactgggctatgctctaatcaataatcttagctaagatttatcagaaattaaaactgtatacttaactaaccacctagataggtgcaggcatatatgaattcaccgaaatttgactcaactccyttggttaatttaaataaaataaaagtaaataaggggaaattgcatactcctatctggactgttttcttatggttttggaatctctggcaggtagaagtaattatttctgtaactctyaggcagggcttaggaattatctcccttaggtttgacttctttctttcttgagaataagcgctgtgtttcgcaagagtaaagaagtggcatttattctgttgtcacagcattactgagctcgagtggatggctctttatttccttctcgtcttttcttttctagtctttgtcaggacccattcctttacccctctttgcttttacggttttcacattttaataatgtaaaaccatgttccccaaacttccgccttttttgtcccatttgctccgctgttacatcatttgtttttaattacgttcatatttacttatgtttttatgcacagctatttataaagaagattctataatactaaagtaaatagaagagcaatatcatttgccataaatacaaaggatccctgaaaataaatatactgccagcctgggcaacatagggagatcactgtttctacaaaaaataataaattagctgagtgtgatgttgtgtgtctgtagtctcagcttcccagaaggtcaaggcaggaggattgctggagcccaggaggttgaggctgcagtgagctacaatcataccactgcactccagcctargcaacagagtgagaccttgtctcaaaaaataactggctgggcatggtggctcatgcctgtaatcccagcactctgggaggacgaggtgggcggatcacgaggtcaggagatcgagaccagcctggccaacatgatgaaaccctatctctactgaaaatacaaaaaaaaaaaaaattagccgggtatggtggtgtgtgcctgtagttccagctactcggtagcctgaggcaggagaatggtttgaacttgggaggtggaggttgcagtgagccgagatcatgccactgcactccagcctgggcgacagagtgagaatccgtctcaaaaaataagtaaataaaataactaactaggctaggcacagtgggtcatgcctgccatcccagcactttgggagtccaaggcaagaggatcacttgagcccaggatttcgagaccaacctggacaacgtacagagacctcatctctacaaaaaataaaacagctaggcatagaggcacacctgtggtcccaggtagttgggaggctgaggcgggaggatcctctgcacccaggtagccgaggctccagtgagtcatgatcatgccactgcactgtagcctgggtgataaagtaagatcctgtctggaaaaaaaaaaacacaaaaaactaaataagtcgtccatccgtccatctattcatacacacacgtaaaatgaaaactaaagcaaaagagtagtattaaattctagttagagacttaggatttccagtgactgaaattggaatgttaggtgttaaagacacacatcaaaatgagactcttggttttttttataagtgcaaggattgcaagatacctgaaaagggagtatttttcccccacatgcatctcaggagggtagcctcagatataagcttaggagtcctgaatttatcatcaatatttatatcgctgtttggcccctaacaccttccctatgatagccctaattggaatatagtaaatgtttgttgcatgaatcaacctatttaacctgtgcgtccttaaatcttacggtctgcgggttgacatttctagtgaagggagacatttctttacctacctgggacctcagaccttggacctcactgaacttgagagcagagctggtttatgtgtaactgaacctgatggttagtttcctgtttcaacttgattaggtcccagtcacagggtgcccacatgtttggtcaaacatcactctggggtgtctgtgagtgtgtttctgggtgaggtgaacatttaaatcagtcacctgattacagcagattgttctcaagtgcctgagcttcgtctcatcagctgaaggtctgaatagagcaaatagactgaccctacttcaaagagaactccttctgcctgatgactcaggtggggacttcagtccttttttttttttttttttttttttttttttttttttttttttgagatagggtctggctctgttggctaggctggagtgcagtgacgcaatctcagctcactacaacctcagcctcccaggttcaagcgattctcctgcctcagccttcccgagtagctgggattacaggcacccaccatcatgcccagctaacttttgtgttgttagtagagacagggtttcaccatgttggccaggctggtctcgaactcctgacctcagatgatccacctgccttgacgtcgcaaagtgctgggattacaggggtgagccaccacgtctggcctgacatcagtcttttcctgccttcagacttgaactgaagcatcagcatttcttgtgttttgatcttgctggagttggactgaaactacacatcagttctcctggctctccaccttgcctatagcggatcttgagactttttcttattttatctatctatcaatccattggtcatcaggttctccagagaatcagaaccaataagagatgtcatacacaccacacacaaacacacacacacacacacacacacacacacactaatatggttctgattctctggagaaccctgactaatacagaggcaagatcctgttttgacgtgcttgaactcgaggacttatgccgatgttaactctgagtgttcctgttttatactcagccatacagatgctcagagcatacctgcacaagtcaactttttgtgtctgcaggcatgggcctgccctgtacatgaggagacagcagacagttcctctccctgctgctggcctcttcatcttctcctggcgtcaccacggccaccgtgatgcctggctcaagtactagttctatgtcaatgatggtaccaatggactctaactttagaatgttgttgactgaaggcccctgccccctgccttgctttaggtggaggatctggtcaaggctttgtgaatcaggggatgctccacacctttctgctctctgcaacagggccagggatctgagtcccttcttgtctatccagaaaccgtatacccagtgttctctttctctcacctccgaataggtgggccttcccaatttacctgtgagaaaactagtgtgccacctcaagcgattctggcctctgttgactgtctgaaccctgtgttttgttgagtggtgcagactagagatgaagacagggattcggcttcgcttgctttatcaagggaatgttcttgggacaaatgtgtgacaggtgaggaaaacaacataggaaaggagacagaagtgaagagaagatgtggtctcaaatgaagtctggcttcaggtttatccttggggggctctggaataaaaatcacacctcaaacttgacccgcttgaggccagaaggccgggctgtggtaccttcgtgtcggacagtcataggctatcctcatggggacctgtatgttgccaggtgtcttgggcaaggtggacaaggatgccagcaaagtgaaattttccagagaaggtcacaaaagctaggaaatggcacagcagctgctaaaaggggatctgaccaggccaccaacagcttctgcttcttcccaaagtcacctttgctctctcctgaccaccgttggtgtctcaaagtctcacatgtgacaacacacatatcatcaaattcatgagtatccatggcacacaatgttttccttttcttctcttctctttctttcttgttttgttttgttgttttattttgttttgttttactgagataggatctgtctctttcccccaggctacagtgcagttgcgtgatattagctcactgcagcctcaaacttctaggctgaagtgatcctcccacctcaacgtcctgagtagggagggcactacaggcgcatgcctccacatctgactaattactaaatttttaaaaatttttttagacactgagtctcaccgtcttgccctggctggtctcaaactcctgggctcatacaattcccctgcctcagaatcccaaagtgctgggattataggcatgaggcaatgtgcccggcccacaatggttttcatatagctattgtgtattgcgttattgccttagtcacagaagcccataaaaaacagattccaataaagagactaggtttgcagagtgatgagtggggcccttgaaataattacatttagtgggttatatgtctatttttttggtcgttccttgctcatctgtctttatttttgtttatttatttattcatttatttgagatggagtctcactctgtcacccaggctggagtgcagtggtatgatctcggctcactacagcttccacctcccatgttcaagctattttcctgcctcagccttctgagtagctggaattacaagcgcccgccaccatacttcgctaatttttgtatgtatatgtgtatatatatgtatataatatatatattttttagtacagatgcggtttcatcatgttgatcaggctggtctcgaacttctgacctcagaatgatccgcctgcctcagcctcccaaagtgctgggattacaggtgtgagccacaatgcccagccttatatatgtatttattaagtttggggggaacaggtggtgtttggttacatgaataagttctttagtgatgatttctgagattttgatgtacccatcacccgggcagtgtatactgtagccaatatgtagtcttttattcctcaccctactcccacccttctccctgagttcccaaagtccattgtatcattcttctgcctttgcatcctcatagtttagctcccagtctacagggttatattaaaagaggaaaaggggtataagaatctaggtatcatggatgatgtcctggtcctttgctgagtcccatttttttcttcctcacctgatttcccccatctggcagaaacttttacagagtgtttgcagaagagaagcctgtaaactctggagtgtgtcctgggtggtttgtccttgggccactttattccctcaccgatcccttccaaaggccatgagttcccagtcagtcatttccctatatcagtatttattgttttaatcaattttccccatcccaagagaaaggcaccaacatgagtccatgtgttttaacatagcaggggtttccctgtcagagcccggtggacttctgtggccataagcaagtcaaggtgggctcctaagtggcagctgcccacttccagaaagctagaggttctaattatgtcttcctgaaaaacagttcaattaggtaaagtgacattttttaagcccttgtgtgtgtccgactcataaaagttcagaaggttgttactgagaggagactgcagtcattttaagatttcagtagctgctggagttgagtagataatttttcccctttctaatattatatattaggtgtgctcttgtgtctgggtgaaacagagcaatcacaatgattgttttttcagtatggtaataattaggcataaaatcaatatttatgtgtaatgtgccatttgaagattctccctgtgtatgatgctgggttttacaaaggaaaatctggattcaggtggccaatgaagtgtcacgatataaaaagagaattttgaaataatgagaattccactcctttgggagtattggcatatgttaaaatacaaatatatctgtatttttctcacttttattagaagagtgcaagtttgttcaaaacaactgctggattatctagtccctgaacagccatttatatttttgttacgcttgtggtttttaaatcatcctcatttccttgatcgcatttgcttctcctggctrgaatgtgtaggagacgggtcggggagactgtgcccatttgacagrtgtgaatgcgracagaggctgcagctggttagaccagggctgtgcaaccctagagccattgcctygaccacaaagccacagtctcctagtcctaatattaagaggtaggaggtagatagagattgtcccttaagccacattccattcttcatatttttgtacccattagagtagtgctgatcatttgccttcattgctggggtcccctaaatgcaacttctcatgctgccaatttagtcctggccctaggaagacgtaggtgataggatagaattcaacaactagaagccatggtttcctggttggatagacttcctctgccaccagaataaaggaatagagggttcctcactgtgccccatagctgcaaagtcacaggaagcttgcagcaggccagtggtaacctctgagtgacttctgagttcccagagctaggaccatgacttttcccctggattcttaagtacccggctaaaattgtgtttgccgaatgaaagtgtgatcctggaggccatgttgtttgtggttcatggaagggtgcttgttcagcttggtcaaagcaagatggtcatactgggttttggtgcccagacgttcccaacactcgcagcagagggcattaggatcatgtttagccaacaattttggaggcacccaacagtgattggatgtcatgtgctttcagaaggcacactacacatcttcggttcctccaagctctaggaaagggttgtggaattgggttgggtgacaacaggtcggtaagaagagggctgggctgagtgtaaagaaattccttggctgggcatggtggctcacgcctgtaatccagcactttgggaggctgaggcagataaatcacctgaggttaggagttcaagaccagcctggctaacacggataaacctcgtctctactgaaaacacaaaaattagcttggcttcstggtgcatgcctgtaatcccagctactgcagaggctgaggcaggagaatcgcttgaacccaggaggcggaggttgcagtgagccgagatcgtaccattgcactccagcctgggcaacagggagagattccatctcaaaaaacaaacaaacaaacaaacaaaaaccccagatattccttattatggaagaagaagcaggaaatatgtttttgaataatctgggtcagagaattgtgcatttattattgctaggatgcatatacacattgaactcagtcaacttactctctctaaattatctcaccggtggagacattgcctcaggagtygagccctgtggtgtgcctcctgctgtcaccacatttgaccacctaactgaccccactgtggtcacctttgccacctgccctgctttggtcccttctctgcattcgccccatgccatgtagcactgctgagtttgaaaataattgcatctcctgaaaactccatttcttagagagtgagctccagcaccatcagcctgaagttgaagaaatgggactcaggaaggctggagtcttcaggcgttcttacaatgctgatgcgactcagacggctgcctgcactgtcctctgtgcttctaagtgaaattacccgtcggggggctcctgagagttaaatcaagcagcctctcttgaagcacagtaaatgctgacgtgatttgtgaagatggctctgctaatagggttggcagcgtcctttggcttggacctttggaccccggctggctgcggaagggagggaaggcagccttggaaaactgatttccgttgccctctgaccatgagaagatccctgtttaggagctagaattcagagttccacgtgtagagggggattccacagtgtgtggtgtgcagagagcactcgtctttcaggcatggggcgccgtttcatttctcctagtgctggaaggggacttggtgaaattgatttggcaaaaaggttaatgtgttgttatggctgccagttggccgattgaagcgctagtaattggggcaagggaagcattcaatttgacacaccaaatgcaggtccaccctggtggatatcttggttgcagcactctgtgtgtgtacgtgtgtgcatgagcgtgtcttagagatgcttttgctcctcttataactcctatgataaaaagagttgccattatcatcctttgtctactcaccagcccccaccagaaaccctcacagaaaaaataagagtttattttttcactatgtcacattgttggagaactgtgcaaatacaagcccttctcttacaggccatgggtctcctaagtgggatacaccacgatgatccactggggcagtggccagcaaagtccctgtccagccagccactcgtttttatcaataaatttttactgaaacacagtcatgcctgttaggttaggaactgcctagcgccacttcacactgcagtaggagagtgagtagttgtgacagagaccatttatcccacaaagcctagaatctttattataatcctgtaacagaaagcatttactgactccttagcattgccatgtttagcaaataaaattgcaggatgctggtcaggcgcggtggctcacgcctgtaatcccagcattttgggaggccaaggtgggcagattacttgaggtcaggagatcgagatcagccgggccaacctggtgagatcccatctctactaataatacaaaaaatagctggcgtggtggcgcatgtctgtaattacagttactcgggaggctgaggcaggagaatcacttgaacctgggaggcagaggttgaagtgacccaagatcaccactgcaccccagcctgggcgacagagtgagactgtgtctcaaaaacaaaatatctggctgggcacagtggctcatgcctgtaatcccagcactttgggaggctgaggtgggtggatcacttgaggtcaggagttcaagaccaggctggccaacatggcaaaaccctgtctatactaaaaatacagaaatcagtggggcatggggcgggtgctctgtagtctcagctactcaggaggctgaggcaggagaattgcttgaatccaggagacggaggttgcagtgagttgagactgtgccactacactccagcctgggcggcagagtgagacgctgtctcaaataaatacatacatacaacataaagtaagatgttaaagtaaattttaattttagataaacaatggataattttttagcaaaaggatgttccacatttaactggacattatctctgtctctctccctccttmcctgcctcctatcctctcttcccaccccctacgatgtctatgtatagtttcaacctggcaaccctgtgacctcagcactaggatatggatagaaaacatagtagcccctatttacctttatcttttatctcaacccatttaaatgtctwttccttgcaatgttttgtaatattacatgtagattgtacatcgtttgtcgataaatcagtgtacaaatactagggrtgagtgtgctcaaaacttatttttactgataatagtccatgatcaaggcrgtttggagaccactcaggacagggaaaacgcagactcatgtgacccatcagggcttcagggtgtcctctggtgaagggcagcagcaggacagagccccacttctagctctggctcaggttaagtgtttcagcgccctggcttctgtgtcttcatgtgcaaatggagataatagtcagcacctatgcaggttactgtgaaaacaggttggaagtatttatctacagcgtggaccagagcctctggtatgtactaggtgccctagaaatgttctttcctctgactcaaatgacaaatcagtttctagggaaaggaacgcacagcgatccccagcgcatcacgagaaatctctctccagctttgccctggctgcgctggtgactcactcggggctaaaactgtttatgtctgcggagtcagagcgttctgccctgcggtttcagttcacatggggttgggcgacacagttttgttttcactttggtttatcgtgtgagtttccatccatcaactcttttgtatctgatgttcttgggaaactttgcgggaattcacttgaaattgtccagtgaacagccattgcgagtctcatggtcagagccgggggcttcccagtgtagggtctggtcaaggaaagggccacttcctgggcctcccaaaaagaggaaggagaaggccctggcttgtggaagagtaagaggggcctcgttaatgtctmccaagcacagtaccccaactccccacatacagtcccaacccttactgcagccgggaggttaggtgtctgccgtgctcatgaacaggaagtgaacccgatcagcccccgaaggaaacatccgtctctctccttggaggagacacttgagtgtctttctctgtgtgctgcagccgttattgatatcagttcccaggcaaggttcatgctggcagaggaggccactctttctgcactggagagcaaaagccatcttatctctctgagtgcaaggtgacagtgaggagattggccctgtgtatccctcagagaccagtattccctcatttgccaatctagaaagaagactgtgtttgctgtcatttgtttcttaactcattgattctcaaacagaatcttcccagggatctgcttcatgctgtattttgtactgtgtcctgagatgatgaggattcggtgtctaccctcaagaagcatcatttagagaagaaattagaaaagtaagtgaggcagaacaggatctggaggcagggaatctaaggctgattcacgttgactttgtataattaaatcaaaaggaaaacaccaactttccacaactaagttataaaaggaccagaggctactccctctgcaacccctccccacttttctgagttgcagatggaaaattgaaagtacccctgattggttgctttccacgaccattcagccgtttgcataggagctgtaactttgtaacttcgcttcaccctctgattggttgcttttcacaaccwatcagacatttgcataggagtgtaacttctttccacaaccaatctgactgattgtgggccattacttcatttccatgaggtgtacaccaagtggccaatgggagacctctatagggtatttaaaccccagaaaattctttaaccaggctcttgagcctctatgcttgggctgctcccaccgtttggagtgtactttccttttcagtaaatctctacttttgttgtttcattctttccttgctttgtttatgcgttttgtccaattctttattcaaaacgccaagaacctggacgccctcctccagtaacataatgaatgtctggatgtggtatgaagagtattggggtacaccacagcagcgtgtgctctgagaacacagtaaacaggcatttgatacagatcagaaggtccgtaaaggtggtatttgaactaagttttgagagctgggtaagagtttgtgaaaagacagggcttaaggaaggatatagtaagctgaaggcacaggactttagaaacacataggctataactgcaaggtgtgtctcagaaggtacatgtgacgtttcatttttatttgtttgcttttttatagtgactgcatgatcattatatgcagaagacgcttgaaggggccagattaggaagggcccatggtccacactgctttttttttttttttttttttttttttgaaacggagtatctgtctctcacccaggctggagtgcagtggcacagtcttggctcattgcaacatctgcctcctgggttcaagcaattttcttgcctcagcctcccgagtagctgggattacaggcacctgccaccacacctggctaatttttgtatttttagtagagatgaggtttcaccatgttggccaggctagtcttgaattcttgaccttaagtgatccacctgcctcggcctcccaaagtgctgggattacaggcgtgagccactgtgtatttctattaccagcctgcactgcatttctattacccgaaaacagtgtggaaaatattaattacaagggagattaaaaagtaaaactggttggttggcctgaagacccacatggtgacttcactaaagtcattgggtaagcaaagaagagcaacactctagttttcctccaagcttcaacgttttctgtttcctcctatgtcaggtcttaatttccctacctgattcaggctgcgctaagctgacttcatcatgactcctggcttccccagtccctgcttcccagcacataccatttattcagtgttggccagtgacgcctgccactgcattttattgatgaagaaatggagatctcaagaggtaaaaaaaactgactataggagccaagactagtttagagtggagtttgaatatgaacatgcctctgtctgtgaaagccagtgtcccttcagccaggatctttcctggaagaactcagtattaaggcacttgattagttcttcctgttggtggactgattgattacatttgaatctttcagcaagcttttggctgagctgggcatcttccccgccttcctccacctctgccttcaaaagcctgaatttccaaggctttctgccatgagtacttagctttgaaaaacatgagcatatttttcattcttcttgccggcctctccctgtgtcatgcctgttattcttttctccctcaacattgacctaggtcagaaggaccctattttaatgtttagcgtttgggggtcactccatagagaggggtttgtggaaatcctttttttttttttttttttttttgcttctttctgtggatctgtttggaaatgtaacattttaaagcccytcttggctggaggattttttatggtaaacataaaacgttcattgaaacattaaacattttacagctgtttttcagcacataaattttcatagacatccaccccctcactgccacaccccctcatagatttcytcttttcctcctccttctcctcctccctcttcctcctctttttcccccmccttcaaatagttccaagaccagagttgagggtgggtgggtagagggctagtttacagataaaatggttggtgtagatcatctagtttggaaaaagcacattgtattttaatactaggaacgtgtgcatgccagaaacctgccaaggaaaacactcccgctgctccttccagccctgactccagctgctatgaactggaaccctgcaccacgtctcagaaggctactgggaagggccataatctgtatccatccacaaggagaggtggaggggggctactctaagaagccaaaatgctcaggaaagccagagctaagatggtgcaaaccagcatgtgatttgtccaaggacatcgttttgatatgatgaaccatgggtggtttgggcatttgtcaaagcagggtcagcagaaagctgacgtagttgggtctaaagtacaacaggactgagcatggtggctcacacctgtaattctagtgcattgggaggccaaggcaggaggattgcttgaggccaggtgttcaagaccagccttggcaatatagcaagacattgcctgtacaaaaaatttaaaaattagctgggaatgatggtgcatgcctgtagtctcagctacttgggaggctgaggcaggaggatcaactgagcccaggagtttaaggctgcagtgagccatgatcatgccactacactccagtacactccaggactttaggcctgctaaagtgcattgtagtaatactagatatcagcacccttgccatggcctcatgagcagtgaaatgaactttcttgctcctggatttttggctcttggccttgtaatttttttttttcatgggatattagtcaacatgatgtgagcagagtcttgagatgtgcttgcatgattggctttgtactcctgcatttttcccatagccaatgccttttcttcagcttgggctgcagaatgagatagatgaaacagacctgaatctgacttataccctggagccattttcagcaaacccagtcaatatcaggccaacctcaaccaattcttagactagtgagtgaggaaaataaatatttgatcttgtgaacccttgaaattttgaggttgtttgttatgcggcagtattttggcagtagctgatgaatacaccactccccatccctagtggcttcctataccatttagaataaaaatacacgctcttttccagggtctacatgtcctgaagacctgaactcctgcctgcctctcagtttatttcctacctcaagtagctgtgcccaatgtcctcccaatatcctgcaaccactctagtcttctttcttttcctgggacccacagagcctatatctgcttcaaggcttttgtacatgttgtttcttttgcctgggaagagtggtggggggcactttcttgcccattttttttttttttttttgagatggagtctcgctcttgtcatgcaggctggagtgcagtagcacgatctcggctcattgcaacctctgcctcccgggttcaagcaattctctagcctcagcctcccaaattgctgagagtacaggcatctgcgaccacacctgtctaatttcttatctttctaacacagtttaaatatcactttctcagaggcctaccctgaccatcctacttaagtaacaataataaaataaaaatacccatcatttatgaagtgctcattatgtgccagcgttcttagcatctcccaacaaccctaggagacaggcattacaatgagccttcgtaatgttcagatgaggaaactgaggctaagagagccttggcaagctgagttacttagctagcaaatggtggagtcgaattcaaaccctgcctctcctcacccactctgtttcttttcttttgagcacttaccactttctgaatatgtatacaattgtttcctcgattactgtctgcctcttcttccctagagcgtcagcccatgagcttatccagcctacagaggagatgctgcagcttggcagagcatggattgctcaacataccagagtttagtcctacctctgtctccaagctgctccatgatcaaggataaactataatctttctctctgcctcagtttttccacctgtcagtggaggggcatgctcttggatgcctgagtttttcttagactcagcatcctgcagccgmaataaccatgcttcttagtggtcctcttgcgtagcagcctaagaaactccaagtccatctgcgccgaagagtattgaacttggccagagcacttgggatctgcagaagtgtcccctgtctgttagttttttcacagactctgctctttctctcccagaccggaccctccactcctctatctcgcatttatccattgcaccccgtgtcattgccgaattcctgagctacaaaggtgaacaggcaccaaagctagggcagtgtccactcaatacatatctgatgaatgaatgaatgaaccttgtctaccacagatagctcaccacaaataaacattttaatctactataaaatagctcaaaagactctatgcaaataattactgttacccagtggtggaagtgcttcactttttatggaaagtctttcactcatttctatctgcagtatttactgggcatttttccacgccaagccctggggatacagagttaaataaaatagaagcttaatccaggcatgctggctgtaaagttcacctttcggctcctttctgccattcttattagggtcttgccccatcttggcagcaagcctgctttaccattggagacctcagctctgattacaatacgtccgtgatcaacatgccctaactggttagcagatggcagctgcatgaagtcactgggcccagataggaatcaacaagggagattaggtaaagtgcttatttgaggtgctgtcagggcccgtggcaaagggttccctcattccctctgcagttatttttcatgcacactcggattacactgctcggtgatattacatctgcatgcgtcttgccctctgacacggcaaacacagatgctgcccraatccttgtaaagccatatatcttaagtaggaaggagcatctttgcaggggaggtgaattgatttgcaaagcagcctgacacatggtctcttatttctccttgcaatcaaataattcatctttatgcccgtagggccgtggtgaaatttgaacctgaccaaatcaacgactgcaaggtttatttgtagcagtgggatcagagaaattagccaagtgtattctaaaattatcaattgctgatcacatggtctggatgtgttttagtgcttaggggttggtggaccgaggctatggtggcatagtcctccatgaccaagggctgtctgcatgggtacgcagataaaacatgcactgccatggggtgacctgtgtgccatgcatcacacacagactactgtttaaccacctacatcataggtagatcctgcattttacaaatgaggaaacagagctcgagagaagttcaatcctcttccctacagagaggaaaggggaaaaaaatggactttcaagacagctgaaattcaaaacaaaacaatgttttaaaattgaatacagccttttgcattaaaattaccattttaataatagtttaaaagagagaaagagagagacccaaaatagtcaaactgaggttttgggttctggtgatagaatattaaatcataatgaagcatttaatgttttgttgttgttacaattgttgttttaccctagggctatgcaaagtagtttaaggatgtatttatttcagtggggaaaaaaagtggaggatatacatttggaggataaggaagcatgaattagggtggaggaagtgttttctggtctagctaaggaggaaaaattatagacctcaaaataggtgtcatttaatatatatctgtgaaaatgggccaaatagattgcctccgttaaagccgtattggatgttcaaatctcgagttacctgaaatgcaactgtacttcctatatttaaccaggctttttataaactgttcctcttaacacctcaagctgacaaccacatcctgggtggttatttaataccaagtttgactttcttcactttgagggtcctcaaaatagaaggtcagagagtagacttttaaaagtcttgcactgtttacaagtcagatgctttttggcagagtgactctcagctcccyccaacaatcccttcttgtcgttcagtagtagatagactctatcagggaaaaataggagaaataaaataagacagcatatggaaggcattgctgaaagtctttttcacaccttaaaaacaaggaagaagagaaatgaaaataaaatagtgagcaacacctcggtgaaagtagaggtgtttgtacagttcagctgctgccttattcaaaaacaggaagaaaaacccactgcccaggtcagctggtgggtgatctccactgaactcctattcagaggctcagtttctctgcaggacagaaatgagaggcacaaaatttcatagctgtcttgcccctyctgtggtctgtaagaatgggaccaggactcctagttgtgaacccgaaaggatttccattaggatcaggaagtgtgagttggcttagaaaaagtaaagaaagaacagtgctgtttcatttatttatcatgtgtaagtaaactgggatttattttattttattttttattttttgtttcagtttcggggggtacatgtgtaggtctgttacatggatatcttgcaagatactgagatttgggcttcaattgaacccatcacccaaattagtaaacatagtactcaataggtagtttttcaatccttttctccttccctccctagtccccccttttgaagtccccagagtctattgttcctgtcttcatgcccatgtgtacgcagtgttgagcttcgacttgtaagtaagaacatgcggtatttggttttctgtttctgcatttattcgctcaggataatggcttcaagctgtatccacgttgctgcaaagaacatgattttcttcttttttatggctgtgtagtatttcgtggtgtatacgtaccacattttctttaactaatccaccattgatgggcacttaggatgattccatgtctttgctgttgtgggtagtgctgccaagaacgtgagtgcaggtgtctttttagtagagtgatttattttcctttgaatgtatacccactaataagattgctaggtcaaatggtaattctatttttagacctttgagaaatctccaatttatttttcatagggacaaggttgcagagaaaagagaagagtgctgtttcaaacagttgaaaccattcctacttccaaaaagaatttgactcaaaagggaatagtacactacatataaaagacagatgtatttaatttgtgtttcgaactacatatcagaaattagttagaagaagatatgagataaatatacctggaaactttatgaattatttctgacatctagcattaaatttagctgggtttcctgggagtcaaaagcaaagagttttcaaccaaaaaaaagaaacagaggtgtatagtaacacacctctgtcctgcaacataactgtaagaatttatcagattatatatatatatatttatcagattatatatatatttatcagattttatatatatatatatatatatatatatgcatatgtttgtatataaatatacatgtaaagacccaaaactcatataaaaagacaaggtgatacagcattttaaaacagtttactaaaaataacaaaacattcttccatcagtcatgcatgccttatatttatgtagatacaaaaatagagtttgatattaaacaatactccaagaaagccatttctgcagagttaaaaaatacgtaggttcagttccttaccaacacgtagacatgttgtgatgaaagaaggaaaggaaggaaggaaggaggaagggaagaaggagggagggagggaaagagagagagagaaaaggaagagaaaggattttctagaaaaagaaaggaaggagggagggaaggtaagaaagaaattaattcccattttagagtaagactggaggcagagtggtcacccagatgaaaatgaataacccaactgtgtctttcttctggtgcctccacgtggaagtgggctgccacaatacttctaaagagaattggcatttttctttaaataaggaggaggatgaggagagagacgacacaaaattcactcacagaagtgaacataaattctaacattggtaaaactttgtctttgttttaaataatcagtcagttgtctcaatccataaaagagtatctcttgtacaatgtctgcttttgagtgattcacttcgatgcgtactgaaaatatacctttaagtagttgagtgacttgaaatattggtaaatgttctttaatattttgtctgtcagtgttagagactatcaggttaaaacaaagatattctttctttcctttttgtttttgacggagtctcacactctgttgcccaggctagagtacagtgatgcgatctcagcttactgcaacctctgcctcctgggttcaagcgattcttctgcctcagccttctgagtagctgggattacaggcacacaccaccacacctggctaatttttgtatttttagtagacacgggatttcgccctgttggccaggctagtttctaactcctgacctcaggcttcccaaagtgctgagattacaggtgtgagccaccatgcctggccaagaatattctttctaatatgatttagctaacaggttcagcagatttttaaactcactttcaaatcatgataaaattctttaagataaacatttgtcttctgttttcccctgagagtggtttagcatttatggagccctgctttgtgctaatgagtttatatgccctgtcttctttaatcttcaccacaactttatgtaataagtagtgtccaataaatttaatcacataattacttaaatggcctggcgagccgccttacctagctggccaggaattccaggagtcaggcttcctgatctaaatctgtcctggtcccrtcttggctgggtgccaccagcagcaacggcacactccagcttaaatatcagtggggataattctaggccgtttgtctgcctggttcttccaggatagaggcagtgatttcagtaatctcttagggctgggcacggtagctcacgcctataatcccagcactttgggaggccgaggcgggtggatcacctgaggtcaggagatggagaccatcctggctaacatggtgaaaccccgtctctactaataatacaaaaacaaaattagccgggcgtgggggcaggcgcctgtaatcccagctactctggaggctgagacaggataatggtgtgaatccgggaggcggagcttgcagtgagccgagattacaccactaccctccagcctgggcgacagactccagcctgagcgacagagtgagactccgtctcaaaaaaaaagaaaaaagaaagaaagaacctcttaggcaactctcatttcattatccaggtacaaagacaatgagtaagaagagtattggggttgggaggaccagtcacccctgtgtcttaagatacttctcagttttctttgttgcagcaaatattactgcagagttttagtgcattatagccttcttaaataaaacttgcccaggtgcagtggctcatgcctgtaatcccatcacattgggaggccaaggcaggtagtttgcttgagcccaggagtttgcgaccagcctggctaacatcatgaaatcccatctctacaaaacataaacagaaattagctgggcattgtggtatgtacctgtagtcccagctactcaggaggctgaggtgggaggattgcttgagcctgggaagtcaaggctgcagtgagcaaagatcacaccactgcagtcaagcctgggtgacagggcaagaccctatatcaaaaaaaaaaaaaaaaaaaaaaaaatatatatatatatatatatatatatatatgtatatgtatatgtatatataaatttaaggaagcatagaattgaagaggctattccaaggtcacatgacttttaagtggcagaaacagggggaattctgtctaacacaatccaatttatccatctcaagaaaagagatatgccaaagagaatgattattaaattatcattaatgtgaactcttgtaattactctcataattttctttaggcttatcccattgggcattgctaagtattattagattgtgattataaatggattccgccaggcatttctcttttgctctgtggcagctctttctctagagaacttggtccctggggatgccatcttctctgtcttcactcggtgaggatggactttaggatgcctcacttctcttcctgagattcttgcttccttcttccttaagggccactgatgagcaatcagtgagtttcaggaagaaggcattcaggctgatttcagacagcctaaggtcagtgtgcaagttagtatgtacctgtgtcttattattgaactggtgaatgaatgaatgactaggtcattatgaatttgtagatcagggttttgaagagtttggcaccggatttgaaagccaatgttctcttagtacctaccgctttcttttcctcaccttcctggatttcctgctcttaaggttttttgtttttgtttttctctccaaataaatggtatttattaaataaaaattcattttctcatttatcaaccagttgcagtctttggatgttttaattatataaaaaaagcatggaaactgggcattttaattagcaagtacagccttgacacaaataaaggcatggctttggttatgcagtgcatttatttgrttttcttgaaataagaaaaaaagatwtcttctccatcaccagagttgctgagtttgacagtgtgaatgagatgacctctaaggcctctacttatagatctgcacggttgggcctgggagctgtactacctcagctggtgggtgataacttactcacagtctgtgctgtgtcctgcactgtccattatctgcaggggtggtactgctgtccccagggaagagaatgctgtccacaaagagccagccatttatactmttaaaagaatacacaggagttgaacaatgagaacacgtggacaacgggaggggggaacatcacacaccggggcctgtctgggggtagggggaaaggggagggagagcattaggacacatatctaatgcatgcggggcttaaaacctagatgacgggttgataggtgcagcaaaccaccatggcacatgtacacctatgtaacaaggctgcatgttctgcacatgtatcccagaacttaaagtgaaaggaaaaaaaaaagtttcatcaaaaaaaaaaaagaaaaagaaaacaccggaaaaaagagactctcttccttgaaggatttaattccaggaattggagaatgtcttgtacatttcgagaaggcaatatagaaaatgcagtgggtagcccaggactcctggtccaggtaaagcaggccttgttgctattcccctggaccatgatattacatgytgggatgatggggtcttgtgatactgattaatttaaggctgcatgatgatgagggaggaacaaagatgttcttgagtcagtacctgccagagtggctgtatcctggtgttgtaatatcaaataattctacattatttagtaaatagccctgcccgaagcctctcagtgccacacacccactgggattcctgtgtgatttgtcacctggaggaacatcacctgccttggttggggagaggaagcctcaggaccctgcaccagggccatgtgacaaatacccattttgatagttcagtacccgctattaaatatgccgaatattattcctgaaaaggggcatggggataattacaaaaacatacctggttccactctcactttcgccatttaatagctttgggtctacaagtaaccaccccagatttttctcctcctctatgcaccagtcatatcaagaattactgtaacttcatwggatttttgtcaggacgctatgatgagaagaacatatgccaaggagacagttttctggcaaatcagaggcctgtaagaaatgatggctttttgcttgtatgaccaagtctcttggagacaaggcctcatgtatgaactctgaggcatgagaaggctcagaattcaccccatcttcagtcttttatttgaaaaagggaagaatgatggaaaggggaggagagagtatataaaacacgaacggggatcctagagacttgaatttctagtatgtactgcctctggctaatagggatctttgacacatacgctttttctccctttccagctggccctgttgcttaaagtggcagaagtagatgtcatgttggcagacagttttgttcactgtcaaaactgggtttatctaatgtgtatttgaaacaaacaaaaaaaaatcaataaaatgagcagctttgggagccagggtgaaggcggttgagataggacagaactccagaggactcttaaacattattcaggaagctctgaagctccctcagtctgggattccagaaaaagattgattaggcaatagtttaccttagaccatgaggagatggactttagccagaacacactgaaaaacacgagaaaagttggaagaaggaattatttttagtgttctgagaatgctttattgatattcctatgagagtttcattggttactgacgctgtgtactgattgggtaaattctagcatttttacactcctttgtttcaccctgtttgttcattcattcttccgttaaactacaattaagcaactaccatatctaattttaaggtggtggacaaagaatcaaacctaagttggggaatgtggcctctggtgattctcagttcttggtagccatgtctcagcatagtcttctcggacacctaatactactgacctgtataatcgatagggtattgcagacatcagagtatgtgacttacgaggctagaccataaaaatattgaggcttctgccttactgatgtggatcattcactctaggaaaagccagctgccatgttgggaggatactcaagcatacccgtgtagaagaactgagcctcctgccaacagccatgtgagtgaaccacgttcgaagttgattctgcagccctagttaagccttgaggtgattgcagcctttgctgcaatcttgactggaactttatttgagcccctatctagaaccaccgagctaagctgctcacaagtttctgcaccacagaaattcttgtgcgagataataaaagttaattattgtttcagcccacttagttttgggataatttgttatacaacagtggataactgcccattcaaagagtctaaaccattaactgttcagcattaggtaagaaaaccagttaattgttactttcttaccacctaccccagcaccccagcaccccagcatgaccaccatttagagggagctgcgcttttgcaaaggtacataggacactgtctgttgcttctgtacctcttgcctcatcagttagtggtgtgatgtgtttgcctgacaaataccatctaggaccctggctgcatgagcttgttgagacagctaaattttacaggtagttggggtttcaccatttaacccagttaactcttctataagtgccgtattaaagcaggtggtgtattttgaaagacgtatgtaaaaacatttgtatttatttatatgaatgaatacattttatttatttatataaatacattatatttattcacataaacacattttatttatataaataaatccatttttatttatttatataagtaaataaattttcctataaataatctttctgattgacagatagcgaccttcctgctatgtccttacatgacagaggaagagatcatctttcttcagcctcttctgacaagtccaccagtctcattcatgagggttccactctcatgactkaagtacctcctaaaggctccccctcctaataatatcaccttggagattagggtttccaaatatgagtttggggggacacattgattccacaacactgaccttctatcagatcagccaggatgctctttttcaaacttctgtcaatctttccccaccttcacaatgtgcccctattattattaatatttaaaatattgaagatctaattaatgttgaaatttttctttaaatcaattcatagattcattaactttgttttaaaaggaaatgttctatttccatcgtaaagggaagatcaatatgatttgccacatatagatgaagataaacctatatacaaagaaaatagaactatagtaattccatgtagctattattaccagagaatactctaagcccaatgcttgtgttctctttgggcaaatggaagatgagccacttgtagagaggtattaaaaaccaaagcaagatcttttgcaagtagattaattgggcaagacaaagggaataataactatgtcaccaaaattatttaatgcagggtccaggagccaccttaatcatccataaattggttaggcatgtttattaccacagattggaagcaggcttcccccaagtgtgtttccctttgtaatgccagtgtcgtaacgccactatctatacttttcaacacaattccaagtgctacctctgcatggcagaaactgtcaaccgtggatggtttctttttagcttgtccttcccgttctacagcatggaggttaagagctctggctttggttccaatcgtgtcccctttcctccctgtgtgttattgattgacctctctgagcccattgataaatggagttaaaaatttatactcactggggtggtgagaaggttaagggcaatgatgtatacaagacattagcatttgctataaggaggatgtatctcagttgccatatttgtatcactaaccatttgaagattttgtgttcaagatttggaagagaatcttcttcccaagccagcattttatattttgcattaaaaaaaaccacaaaagacaaaaaaaaaaaaaacaaaaaaccttcacagacaaaacccagggcatattttaggtgtgtttaattcgaagctcctgatgtctagcaggaacctggaacttccctttctatttttgtgggtcaatatattcccacttttgatttaaggtagtacaagttgtatatgggtgccagttagggattcctggctgatctgtgcaattttttcagtgaagttatatgtggtgcttagtggtgactatgggaagattacacggagaagtgttagaacagggtaatcaactgggaacccatttcaggtgaatgccaagatgttttgaaggtgggcatggcagggaaataacaggatgccatgcttggtgagaaatgaattcgtaagtgtgcactgtctgccataaagagccaggcaaggcacagaaaatattcttctgtttctttttctattstaccctctctctgctttttcttctctcactgctgctgaagcagtgagagcctgttgagttaaaataagccagtgaggattttggtggtgtttgcccttgaagcctcttgacatacagtgtcatcaaggagcagtgggtgagcctgcccatatctcgggcacaaacctaggtactcattgaatcctttaaactaaccctctaaagaattctcaatctgtggatgagaaatggcaacacagggatgttaaactgcatgcctacaatcatccatttggaagaagcagggctggaatttgaacatgagactgtatgctccctgttgtagtttcctatggctgctgtaaaaagttagcacaaatgcagaggcttaagacagcacaaatgtcttatcttacagttctgaaggtttcgctccagagtgagttttatggagtgaaaatcaaaatgttggcaggccttaggggagagtccattcctttcatcttccagtctctagaggctgctggcatttttcagctcacggccacagcactctaatctctgctttcactatcccttcttttttctgtgactctgaccttcttgcttccctcttacaatgacccttttaattgcattaggcccaccaggctcatccaggatgtatttgtctgtgttcacactagtgataaagacatacccaaaactgggtaatttatcaacaaaaagagatttgatggactcacagttccatgtggctagggtgggtgcacagtcatggcggaaggcaaaaggcacatctcacacggcagcagacgagagagagtgacagccaggtgaaggagtttcccgttataaaaacattagatctcatgagacttattcactaccatgagaacaatatgggagaaatcgatcctgtgattcaattatctcccaccagggtccctcccacaacatgtgggaattatgggagctacaattcaatatgagatttggatggggacacagccaaaccatatcacaggatagttccccatatsaaggtccttaacttaatcacacttgcatttgattttatcatgcaaggtagcatactcacaggtgggattaggacttagacaccttcagcaagaaacattactcaggccaacacactcctcaaacctaagcttattcccaatcacacagtcaggagaggatgcccacaatgcacttggggttttgtgtctgtgtctcccctccaagaacaggtacttgcccttgtctttggagctcacagccaagtcctacagtcagcatcagacggcttgtctcaagctgctgatttccgggagcaaagctgctgtgggacatgagactctttgaggcagaatacctctcatgcctggagagcattacaggctgcattastctgttttcactctgctgataaagacatacccaagactgtgcaatttacaaaagaaagaggtttaatgaactcacatttccccatgtctggggaggcctcacaatcataatggaaggggaaaggcgcatctcacgtggtggcagagaacagaagagagcttgtgcagggaaactccgctttataataccatcagatctcatgagacttattcactatcatgagcatagcacaggaaagaccctcccccatgattcagttatctcctaccaggcccctcctacaacacgtaagaattatgggagctacaattcaagatgcgatttgggtggggacagagccaaaccatattacaggctaatgactgagcgggggctgtttcttgttgtgttcttataagaactattgcattttctttttcttccaaatatagttaatggcctcatcttttctggactaggtttgtagtagaccataagcaaaagagttcagaaagcacggcctccaagaagtcggatctgcttgtctttatcaatctgtttggattttcctggcccatttactcacaaatttaaaagacatgatgagttttcagggagaactctttagcatttacattttaatttagttttgtttacctgtttagtgccctctcggttcccagaccatcaaactcaccattgtcaccggggagaaatttgtgttggctgaaatctgtagtggttggtctgctgcttttctttctctgctcatctaccctgatagtttccctgtggtttgtggtgggctcacagctcttgacctcaggactctcgctggtctagaggagattggtttgtgggggcgtctgacatgtttgggttctttgtgacatctgggccacccggttgagtctgacaagaaacacttaatacctccttggctttgaagctctcctttgtggcactacaaggtcctctttgaaatcccacattcttttttggatttaggtattaaccccttgctgtgaggagaaagataattgtcaacacacttaggagagaaatcatgcagtaaagctgacccgacatagactaacttaaaactaactagttcattagtgctaacttagttcattagtgctttatctccttgtgtgtgtgagtgtgtgaggggatcaattatatacataagacaaagaccacctaggaaatgtttgagaaactgtgcagtgaggatgaatcaacaagtaaatatcatgagaatttcttagattgaagaaatattactcctatttggtgtcaactctgtgctggccttttcactsaagttctctgatgtaactgcccacagtaatcctgtaaggtatggctaatcatttccattttatagattaggaaaccaaggtcmaaagtggtgaattgatttgaccaaaatcacagacccaggaatttcctcagccaagagcctacagcagctgtgtcttaagactgtgccctttcatccaccctcttggtactcaaagcttggtccatgaaccagcagcttcagcatctgctgagagcttgctggagatacagaatctcaggcctgactgacccgaggcctgctgagtctgaattttaaccagagtctcttggtgactcgtgtgtactttagaaggggaactgctcaccgcccccacttcccactgagtcgaatagacattaagtgagccttccttatgtgctcagcctgtggtgaggctgcaaagacaatacgacccagcccctgtaatgcaaaattcagagcatagggcagcacactgctgccatgagtcgaggtgacacagtactaacagtgggcacagggggctcggggcacagaggaggggtgcttcccagggagactgcccgttggagcttactcctaagctaattgggaggcaggaatccactgtggctgagaacagcagctctgaatttgcactgtctggtttcaagtccaaattctactacatcccagctgtgtattgtggggcaagttacttaacctctctggcctcagtatctgtatctgtaatatggggaatcataaaagcacctacttgttaaggcatattaaatgcaacgctactttgaaggactcatagtagttaacacccagtttggtaagtgttattattgaaggctgagaacagaacgacaaacaacaatcacaacaaaaggctggggaagattttcctggtggggggaccagatgagcaatagatctccatatgcagaggggtaactgagtacgactctgggacttacactagaacattcatattgcaataaagcagatttttcctgagcacctactctgtgccaaagcactattgtaggctgtggagatagggagctgaagtactgaaagcgttacagtcaagggccagaaaaccattgttcaagcaattggcgtatggcttgatctgtgtttattacaaagcgatacttttccttctaagtactgctttacctgcatcctgcaaattttggtatgttgtattttcattctcattaattcaaaatatgttccaatttcccatgtgatttcttcttcgaccctcacatgtttattacagcatttacttgtttctgttcatccagaactcattgaatacctgctatctaccaggcagtggcctggtcacatcttctgacctcaagtagtttatagtccaaaaagacattggctctttgggatagaggcactttttgggggagagaaacatgaatgcaaytttttacatagagtatgaaactctgttccaaatctctcaaactcaggttctttgattcttaaggtatttttcactgccgagttgctgtcattgaaacaaaatctgtcctggtcaccactgtatgcccagcacstagtacagtgccctgaacatattaggtactcattaaatacttgttccacgaagttgttatttggtattcacgagttttgtctcaattccttttgattcttcttttcacccatctcatgttgacttaatttctccagcattcagttaagacctagccgaagcataattgtcagcatagtagagctggctctcctctttctaattgcccwgcagagtttttggggagtctgtatgcaattgtgtacaccccaatgccccaaaaccctcttctatttcctttagcactcttgagctgaagaagccccactctccctctgccccacatctattgtgggctgggatacatgttgggcctctgcccagatcatgcttggagtggcaccagctgggtaggacatgtgaaatatttgctcagagagatccagaagtgttgatctgagtaggatcagctggtgctccaggataaaaatcgtgtcaccacttttgccgaaaagtcactgtgtttctcctgtactcagcaggttacagggtgccatattgttttcagtcttccggctctaccctgttttgaagtgcggccgggtgttgttaaacggctccgccttcctgccagaatttctccgtggggaggagctgccacccagtccagtgagtatggccttttggtcagcattgcagaacctggcaagtcctaattccctgtgagcttgacacaggaggccgcctcctcctccaggcttacttggaagcattctgtcctcttgttggaagggaaattggtatggtagggaggtgcttcttctgggagtgggtttgtaaaatcaagactgttttcatccaaaccagttacctgtttgtctagaacctgtgttctctgctttctgcctcttgtgttgacatttctcctttggccttcatctgttactcgctcacatgtgccgtgccccgggtgggtttggaagccatgctgctatggtttgattcctggctttccaacattacctttgataaccaagacaagtggcagtctaagcctcagtttcctcatctgcaaaatgggtgcaattctagtacctccttcctaaggctgtgaggattcaatgaggtactgcttgcaaagtttctagcacagtgtcttgaacacggtaaacaacttacctaggtctgatctcatttgatattgttgctcatagcaaaggtttgttgagtttactacggatataacacttgttcttttttaaaataacttttaaaaacgcaagtgttgaattatctgcattgtgcctttagggcatacacatctgcttacaatattttttgagctttcagaaaacttaagatatggttgagggatgcaggaaggaacaggacaagaacccagatccctgcccaacaggacagtggaagggaagtctcagcatctcgaaatgagtgcctggagaggatgggtggcggctgtgcggggatgtggtagggtgatggtccttgaaggatgctgcagatcacagtggccccacagtgtggggattggggtgggatatgtgacaacaaaggcatccctggcagaggatccagcacgagcaaaggcagaaagtccaggaagtgtcaggaatgagaagagcccagtagaggatgggcttagggacagtgatgagaccttctggtagaggcgttgaacactagggtgagggctttgctctgacttcaggaagcaggtgagaggccctgaaatttccacgtaagattcggggccgggcacggtggctcatacttataatcccagcactttgggaggctgaggcgggtggaccacctgaggtcaggagttcgagaccagcctggccaacatggtgaaaccccatctctactaaaagtacaaaaattagccaggtgtgatagcgggcgcctgtaaccctggctactcgggaggctgaggtgggagaattgcttgaacccgggaggcagacgttgcagtgagccgagattgtgccactgcactgcagcttgggaaacagagtgagactctgtctaaaaaaaaagaagagttggatcacagcaaaggtgagctttaatgagttcactctggcagttgtgccgaggagggactggcatggagagaaaacagaggcaaaaatcacaacctctgtcagagaactcatcgcactatttctgtcctgccctgggatggtggagcctaagggaacagagaggacagagtgggtggcacaggcattgcggaggcagaaatttacgtggcttccatgcccattggtgtgaggagtgaggggtgatcagggatcccagtggcttgaaagtataacaaaagtatgactagatccaggaaatacagctggagagacccaagtctgcacagaaaaggtttacagagcccaggcacacagatgacatgagcagttccaaaggagtgggacggggtgaatgatttgtggtcagaggtgtggtcacacataccgtcccctgatagtcggtgggaactgggtcaggttccatttgccaggggcaggacatactgcgtgccttggccttttctgggctactcaaaaaaggattccaccaggtaaacttgaatcacctagcgctggtagaaagccttgctcttcgtcatctctcctgtgtatcgctagccttattaaaatgtgcagaggagaccgggcatggtagcacacttgtaatctcagcacttggagaggctgaggtgggagaattgcttgaggctatggcttcaaaaccagcctgggcaacacagcaagaccccacgtcttaaaaaaatttagccggctgtcgtgtctcctccgtgtagtcccagctattcaggcagctgaggcaggagggctgcttgagctcaggaggtggaggctgaagtgagctgtgattgtgctgttgcactccagcctgggcgacagagggacagcttgtctccttgtctctaaaaaagaaaaacatgctcagaggccttgtgagttagctctctccaaagtttttaagacaaggaattcagttaatcaagtttgttagacttgtttgaaaaaagggcctgaacaggctcagagcaagggcagatcaagctcttccacagattttaatgttcaggttttgtgacctttactttttttattttggcaaaatgtacacaacttagtatttatcattttaatttataagtgtaaaattcatagtcattaaatatattcacaatgttgtgtaaccatcagcattacctatacctaaaatattttcatcacatcttttaaaaaataactgccccttcctcacwtccccaagcttgtggtctctggtaacccctactttactttctgcatctatgaaattgttttcaaggtcaatccatattgtagcatatatcaaaatttctttctttcttcctctccttccctccctccctccctccctccttctctctctcctttcctcccttccttccttccttctttccttccttccttccatttttgacagggtctcactctgttgcccaggctggggtgcagtggcacaatcaaagctcactgcagccttgacttcctgggcttcagtgatcctcccacctcagcctcccaaggagctagaggtgcatgccaccatgcctggctttttaaatttatttttattattatttttttatttttagtagagacagattttgccgtgttgccctggctgatcttgaactcctgtgctccggtcatccacccgcctgggcttcccaaagcgctgagatgactgcgccaccacacctgccacaaaatttctttgttatggctgaataatgtttctgtgtgagtgtgtgtgtgtctgtgtgtgtgtgtgtgtgtgtgtgtgtktttgaataatactcctatgaacattgtaccaatatctattcagatctctgctttcgattcttctgcatrtatacctaggagtgaaattgctgcgtcgtttcgtatctgtgtgcttaaccttttgagaaactgccaaactgtcttcaacagcagccgcatcattttacattcccaccagcagtgcatcaggattctagttgctccacatctacccaatacttattttacttaaaaaaatagaatagccatctgagtgaagtgttacctccctgcagtgttgattcccatttccctaatgatgttaagcgtactttcacgtgcctactggccgtttgtgtatcttctttggagaaagtaacatccatttttgatactcacatggctttttggttctatttttgctttcttttggctaatgataaccttccagcaccacgagtttggactgtgctaatgtcttctagtactgtttagaagttgaggtaaaaagaaaacggtaattgaaagagacagttgttgtttacattggggaggttggtattccaccccctgtgctttttcattagctgtattgtattcttattatgtgttttaccgggtaattgtaattcttggctttggattttgtcccttttttaggctgcggggcggggggtcggttattttataagcaaagaagtacagccagtatgattttgaagcaactaggccccagtagaaaaaagttggagagtgaaatctcaagcaagccaaaaagtgatagatgagttaaaaaaaaaaaaaaaaaaaaaaaaaaaaaagttgcctggcttggtgcagtggctcatgcctgtactcccagcactttgggaggctgaggtgggcggatcatctgaggtgaggagtttgagaccacactggccaacatgttgaaacccgctctctactaaaaatacaacaattagccaggtgtggtggcgcacgcctgtaatcccagctactcaccaggctgagagtggaaaatcacttgaacttgggaggcaaaggttgcagtgagcggagactgcgccgctgcactccagcctgggtgacacagtgagacttcatctcgaggaaaaaaaaaaaaaaaggctttggagcttcctaatttctaaatagatttcctttataattttcagaggttgtgaaattaactctgtagattggggagtgtagtttgtcactctaattgcccagcgttttaattatcggcgtgttttatgcttttgtgaaatgctcatttcacagcttgctggtgggtctttttgtggaacgagaaagtgaatattcacaccagaaatgaggtactgaccctgaagggctttccagtcaaagagaaaggagagcatgacccgccaatgccgttgtttgtaagcaggaagctgacgctgcgccatggtgtaggggaggaggacggtttccattctgttttgagcatcagaataaaaccaagcaccagaaggtgtggttcaaagatgctttcctttttcagtctctggtcaatttgttgttatttttcttcaagagagttgttggggttgggtaggcgcaggggccacaaggccatctttataaggctctggcatttgatagtgaggtattttggtattccaaataattggtggaaggatggaaaggttaaatggaaattatgtaagggctgcaaagagattcatatatgactatttcatgagtgcttactatayaccaggcgctgttacagcccgtgtaatgccacctgggagttggggggagtcaccatcgtccatccgtctgtscatccatccatccatcctgcctccctccatcctttctctttttcacaatgtctcttgctccgccccctctcttcccctccttccttcctatccagtgcttgtaacctgtcaagcacatgttgtagccattggggacatcgtggtaaacaaagcaaagtccttgcttgcattctgtgacagatggagataaaatgggtaattaacaaatgtaatccctcccacccaccccccacattatttatttatttatttatttatttatttatttatttatttttaccatrtctgttactccatcagtcaggatccagttaggagacagaaactatatcataattttaacagggaagatttaatattaagaattattagctacaacagggttttggctactaaagggtaaagagaatcaggccgagcacagtgactcatgcctgtctgtaatcccagcactttggaaggccaaggtggaaggatcgcctgagtccaggagttcgagatcagtgtggacaacatagggaggtcctgtctctacaaaaaataaaaaataaaataaaaaaataaaaataaaaataaataaaaagtagttgggcgtgtgtkgtggagcatgtgggggtcccagctacttggcaggctgaascaggaggatcgcttgagctcaagaggttgaggctgctgtgagctatgatctcacctctgtactacagcctgggtgacagagtgagaccgtgtctttaagtaaaataaaataaaaaagagtaggtcgggcatggtgggtcatgcatgtaatcccagcactttgggaatacgaggtgggccaatcactgaggtcaggagttcgagaccagcctggccaacatggtgaaacccygtctctactaaaaatacaaaagtkagtcggggttggtggtgtgctcctgtagttccagctacttgggaggctgaggcaggagaatcacttgaatccgggagccagcggttgcagtgagcttagattgcaccactgtactccagcctgggccatagagtgagactctgtctcaaacaaaaaaaaaatttaactctaaagaatccaagaatacagatttgggagcagccagtaccaatgggggatggggcagtacacccaggaaagagcaaatctggggtccccacgggccaggactgggatctggactgggccatggcccattggatggcagaaaggttctcactgaagcccccataaaggtgggactcactgggaaaccgctctctgtggtgccagggaaggacgtctgtgggaggtgcctaccaaggaagtctctggaaatcagcctgcaggggtggagtgccgggaaactcccgccccctccccccctccccgaagtgaaccgcccacagggagatgcccctatgggagcttcgcaccagaacccgtctgcgccagtgtccctgcagcgccctctactggcgaagctggacatggcgtccgctggcaaaggggaaactcttctttcctcccaagccgagcaatgctaaatgtgcctggtactgagacgtcatctgtggacggttggcaccgatgctaatcagtgctatgggaaaataggcagagcgaggagcgtaagaattattatgtgtgctgtttgatagagactgtacaaggaagacctctctaaaaaggtgacatttggagcagagacatgaaggaagggattgctggaggcagaacattctaggcagaaggaaccgcacgtgcaaaggccctcaggtcagccggcatggcatgcaagtaagccacctgcaacacagcaggtgtggatgaagggaagagaattagcatttggccagagcacgcattttaagggatggagatccatttggatagtcttgaacacagaactgaccggaactgacttactctttgaaaagatcgctctggctgctgtgttgagtggattggtaagggacaggtggtgaagactgaaacagggtatccagttaggaagctaccacagtgatccaacccccagcttctgttgaggttgaagaacmtgcatgcccaacctaaatatatgttcaaaggtggttattactgtttgaggtgatgaaagagttttggagatagaagtgatggttgttcaacatcatgagtgtaattaatgccacggaattgtatccttaaaaatgcttaaaatgcgctgggtgcggtggctcacgcctgtaatcccagcactttgggaggctgagatgggcggatcacttgaggtcaggagttcgagaccagcctggccagcatggtgaaaccccgtttctactagaaatacaaaaattgggcgggcattgtggtgggtgtctgtaatcccagctatttggaaggctgaagcaggagaattgcttgagcctaggaggtggaggttgcagtgagccaagattgtgccactgcacttcagcttgggcaacagagtaagactctgtctcacaataaataaataaataaataaataaataaataaataaataagagttggatcacagcaaaggtgagctttaacgagttcagtctagctctctcacaaaaaaaaagttaaaatgacaaattttgtgttacatacattgtactacaataaaaaccatttttttgaaaagaatagtacaaaaatgatacttccctctcagtgtattttaccaagggattattagtgtatatgtgtgttcttactggaaatgttaattggacttgtaattctttttttaacttgtattttgggttcaggggtacatgtgcaggtttgttatataggtaacttcatgtcacaaaggtttgttgaacagattatttcatcacgcaggtaataagccttgtatccaatagttatttttctgatcctctccttcctctctccctctaccctcaggcaggccccagtgtctgttgttctttctttgtgtccttgagttttcatcatttagcttccacttgtaagtgaggccatgcagtatttgattttctcttcctgcattagtttgctgaggataatggcttctagccccgtccgtgttctcgcagaagacatgatcgcattcttttatatggctgcatagtattccatggtgtatattcactactttttttttaatccaatctgtcatttgtggacatttaggttgattccagtagacgtgtaattcttcttggaaatgttaatcttgatcatttggttaatgtgatgacttctgggttctgcagtgtgaagttattatcttcccttttgtaggtaacaaatactttggaagagattaaacaaacaaataaaaaagtggtgattgttattaccagcatggctactactagctaattccaggcttcaagccactggggcataggcatatgtttagctcattccacaggaggggaacagaggctcaaagaacctaggtaagttggccaggcgcggtggctcacacctgtaatctcagcgctttgtggggcttaggcaggaggattgcttgagctcagaagtttgagaccagcctggacaacatagcgtgaacttgtatctacttaaagtaaaaatcaaaaaaataatggggtgcagtggtacatggctgtagtcccaattactcaggaggtggaggtgggaggattgcttgggcccaggaggctgaggctgcagaaagctgtcatcatgccgctgtgctccagcctgggcatcaaggtctgttttgcagaccttgtctccaaagcaaaacaaacaaacaaaagaaacaaacaaacaaacaaaaagaaattaggtaacttgctcagtggctagtgagtggctagattgtaagcttcatgagggcaggggactttgacgattttgtcggtatcctaagcccctagaacagtgcctaaacatttgttgggcagttaatatatatttgttctattaataagtagagcccgagtttgtgttctccgattccacaccccatgttccttctactacaacttctggctctggcttctggactgtcagtcattagcactccctatccctaagatttcaggaatgttcagctgttgcctagcttggaatggaccatcctctggtcccacccatgggtaagtcattggctgcagagcgcagacatttggctcccttcgggacattcctccctcatttaaaacaatgaggcgggcagcagggtactttgtcccttgtgttagctgaagttggaggatgctgtgttgatgggaaaacgctgttactattcttagactagtggggctctcacttattcatagctccgcactcgtgggtggaatgagaagttataatagagtgcaggtgcctctcattgttttccgctactcactggatagtgtttattaaaaacgaaatcacagtggtgtgtctggagttgaagtctgaacaaataacccaaaatgaggagtccctggaaggtgggcaggaggcgacaaacaaagagaagcaaaaacaagtttgagctaattgggatcaggcagtactttgcatgtgagttctgaacagggagcttggctgcaaaacgattattgtatttaacttctgttggcatcattcgcatacttgtatgggagatccagaattggaatttaacacagttttcccaggcccttcatggaatttgaaaacatgactctgaaagcatgtggctgaaatgagactctttcacactgtttaaagatgcatgtgcatatgttggtgtccacacatcaacttaattttttcatgttccttgaaggaagcccttctaggtccttctgaaagaagggctggagatttttattaaacattacttctaggctgggtgcagtgactcatccctgcaatcccagtactttgggaggccaaggcaggcagatcatgaggtcaggagatggagaccatcctggccaacatggtgaaaccctgtctctactcaaaatacaaaaattagctgggcgtggtagcaggcgcctgtaatcccagctactcaggaggctgaaaaaggagaatcgcttgaatcagggagtcggagttttcagtgagccgagatcgcgccactgcactccagtctggtgacagagcgagacaatgtctcaaaaaaaaagaaagagttctgaatgatgataggtgttggaatccacgttggtgtgtctcatgtcattttttcgggcagtttcttgacagacccattttgtgtgtgtgtgtgtgtgtgtgtgtgtgtgtgtgtgcgcgtgcgcacacgcatgagcctgtacgtgtccccctccccccccacacatatgcacataagatagcataaggtagttccctggcacatggcgttgttcttaaccatgaggtgctcccaggctccgggcagttccttgaaagactcattgtctgtgtggggggaggggaggctgtacatgtccccacccaacacacacacatacacacacatgggcacatatgatagcataaggcaattcctggcacatggcattgttctgaactgtgaggtgctcccaggagatcttgtgcttcctatcacatgcccattctgcaagtccatccccttattgagcagatgtttaccgcagagcactaagacagatggaacgtcaccgttgcccatagcactcatggacagcatggggtcccctgtagcagatatttgtggtgtatgctcgaagaggggctgcaggtagaactagaaaggtaggtaagttgggcagatggcgagagacatcacagccctcactcctgagggtggggagccatctcaggctcaggagaagaagagtgacagagtcaccaactcactccatcaaatgtggctgtatttttagaagtgtctggttcctgaaatacctcaattccttttgcctgcctrgctcctctcctctcttctgcctgttcattgaactgaaagattatcaggactgtattcagcccggccaataatatcacaaaacaaaaatatcttgtgggtttgaaatttatgagtgttttgactgttcacagcaatgcctttgagaatcacagtgtgtcatcccctccccacccccacgaacatgtagtttttgggcaacttttcgatgagtaaaacagggcctgacttttaccccaaagtgatgttcttttgtggcttgtctactccaagaactgagatacccagactcatttctcatctcttgttgaaacagagaagtcactgtagcgccctccggggggtggggtatcaagggagagtatgggctttgaaactgctcatcccgtctacaaccttggagggcatggtgtttcactcccccacctctccccacaacttcaccctgctccaatgaggatgaaaatgtctttcttatagatgggacaggagccttagtaatatggtgcgagcaatggttcacataggggacaggtgttcattcartggtgggtattattataataatcattagcatcattgctagtgactttatttttcctttagccaatggagcagtggcttttggcccactactttcgactgaatctatgagtgaatgtgatcctccgttttaaccctgtcttattggatgttggtaaacagtatatcatgagcccctgtaagagcttgaatccttcaaagacaaggtcagtcagtggccatcactactctaaacgtaagaccctgtgatgactgacacttactaggtttctcatttatttatttttctctgcaggacacagctgtgtgttccaaagatggtcttaaacctataggagtataacaccatggctagttcagaaaaccttattccaacttccaaacttagaagatactgggaagtaaaagggagagaagggaatgcatggcttgggctaaaaaaatgattctgcattcatctcagaaggatgttttccagtctttctctagaaacaacttttgtgtctaaggattgtgggtgaacaacagcagcacaggctacattggcttggctcggtggttgggatggtttggctcttactgggcagtaagcacagtggctgggataggaccttggcatctcgtgcgaagcccctctgcctkgagtcctgcctctgtgacacttgcttactgtgtgacctgggtcractcatacctactgttcgtcagttttctcatctgtaaaatggggattccagtggttattatgagaattaaatatgacgatacataaatagcacctggaaaagtgtttaggaaaccttgacatgatgacctgtttagcagcagcagtgtgtgccatacttacctttatggaatgaacagatttggagtgaggatggatgtttagctcactttattagtctggtctcacactgctataaaaaactgcccgagattgggaaatttataaagaaaagaggtttaattgactcacaattctgcatggtcggggaagcctcagaaaacttacgatcatggtggaaaggaagctagtgcaccttacatggcggcaggcaagaggggcagggagggagagagaaagagggagggaggaaaccaccacatataaaaccatcagatcgcgtaagaactcgctatgtcaagaatagaatgggggaaccacccccatcatccagtcacctcctaccaggtctctcccctaacatgtggggattacagcttgtattacaattcgagatgagatttgggtggggacacagccaaaccataccactcatggcatctcgtttttacagagtatatgtgttttcagattttgcatgacattttaggataaatgtgatgaaaatgaggaaaattrggaatgaagtttaggtcagaaaagtttcagtgattattttttcagaatcattgtttcttggtttctagggtccaacatgccattgttcaatggctgtatttcagaggctgtattttttttcccatctcttccttcctacttagaagacagtgacatttcctctgtgcctctcaggtgtcaatgccatccaacaggaatttgtacaaagaaagggaggactttctgatgatgttgtccaggacagtggccccatgtagctactgagcacttgaaacgtgactagtatgaccaggggctggacttttagtttaattttttgtaatttaaataatttaagtagctgatgtgtctagtggctgtcgtattggaaagcacagagtagacattgcaaatacagacgtagaaagacaccgtgcctgctgctaagaggcccctggtcctactgagtggtcagctgtttacactgacagtcccagcgtggtataataagcattaacacagagacatgtacagggtgctgagaaagctaatttttgcaatagtcaaaaaagacctcagggcagactccccagcacagagttccaagcctttacctaaaaaggtaatcattttataagtacctattatgtgccagatactaggataggcactttgcatagaaactcacatttcgactgggcctggtggctcacgyctgtaatcccagcactttgggaggccggggcaggcagatcatgaggtcaagagatcaagagcatcccggccagcatggtgaaaccctgyctgtacaaaaaatataaaaatgagctgggtgtggtggcacatacctgtagttccaactgctcagaatgctaaggtaggagaatcgcttgaacccaggaggyggaagttgtagtgagccaagatcgcatcactgcactccagcctgggtgacagagtgagactccakctgaaaaaaaaaaaaaaaaaaagacatttacattttatctttactgtagctatggctgcctatcccaaggatgggaagtctgaagttcaaactggtgatgatccccaccccaagtcacacagttagctttatagttaaatcagggtgtgcctgatttcctagccataccaggcagcctatttcttgaataacctcccatcccctgtgtctcctttgtggagctcttggcaatactctggtgattggtaaccactgatacgccgccagcagtccacgcttgggtggaaggcaggtttcacgtaactgatttaccacttggtaaaggaacgaggtgacagcaagaccacaaactaataaatatgccggtattgacataatgtcggacctcagtatgattgatgcatgtgttgttgactgggatgtcacatgttcaggctgtaatcctggtctcagtatgactgtgaggacggggccaagtcatttcacaatttgggtgagtgttccaagcttctcagaagagcgacgcaatagaaattcaaggtatgaaattcaaggtgtggtctcagagtcattttatcttacagcttctctgctgtgttttctcagtatgtgaaatgggaacatsacttaccatctactcacctcctgtttgagttcaagggaaggtttgcagattggcctgaaggaagacttctcttgaaaaactcawaccaaagagcacaccgccgtccccaaccctgagccatttctgtccttttcatggaaagggaactgtgttcgccagctcgtaaagccccggcgtctcctcctagaagaaacacccacattgacccagcagtgttcattttcccataaggtggtgctggatagggataggatgtcgccccttgttcaccccttggcaataatctgtttgattcactccaaatgctgcttctgatctccatctatttcaggggatgaccagtctgaataaaaccaatgagcttaatctacttgtggaatgttatagccggaagggattcatagagatcactctatcrcctaaaattctctcttctacatatctcastgttggaaaacataaatgtgactccaacttgtcttttttgttgtttgtttttgagacagggtctttgtttcccaggctggagtgcagtggcatgatcttggctcagtacaacatctgcctccctggctcaagggatcctcccatctcagcctcctgagtagctgggactrcaggtgcatgccaccacacctggctaacttttatttatttttagtagagaggcagttttgctgtgttgcccagactggtcttgractcttgagctcaagaaatccttccacctcagcttgacattacaggtaagagccaccgtgtccggcccccctttcttcttttttaaagtggggtattaaggctcagaaaagagtgtttctgccactgcagaggattgctgacattattagttgctcactctgtccaaggcattgtgctcagctctttgtacagattgtttaaccctcacaagtctatgaatagagtatattacccacttcattttaagtaggaaattgaagctcagggaatcgtagcagagggccccagttcacactgctgatcartgatgcgactgggatcaccacagcccatctggttcagaagcttgttctcctaaccaggatgtgagagacattcttgtcctaggcagcacgttggtggcagaggtgggatctagactgaggctctcattctgtaccctctctggccccarggaaggaaaggggaaggagaagggcctttgggactgggtggatgtaacactttctgccacctctactcttcctgctatagattaaaacagaagctctgaattgcagccacwaatcaataatgaaaagctaccagaccaagccctttcttgtttagtgttgtgtcttctgtgtcaacatctctggaacatagtcaatggcagtacccagtagaagccatatggatactttttctcaagtsttgaaataaattaatggtgtggccatggttctcgtacttcaggtccctgtgagcccctggggtcctacacaacttggggtaatgctatggtcacctgcatcccctcctctccagycctcacctggttttctcttctccttccaagaaaaaacaccyataccattcttaacatctctggaagctgggggtcaggagagggrgatccataaagttcttgtcttccccgaytcaagaagcttaagggtacattcactcactcatgaattgactggtttattcattcactggttgattaattcattcattcactggttaattaattaattcatgtcatcctttggatgtcttgcagagctgagtgctgaaataaaatgataaacaagtcaaaaacaaaaaggcctctgacttaacaggacttccgtgatkcgggggaagaagacaataggcaagtaagcaagtaaatatacaagataaatagaaactgtgatgagggarttaaagaaattaaactggtccttgtggaagcaacttcgggggaggaggaaagacagggaagaccattttaaggaggtgatgtttgaacttaagaatcaaaaacagtgcaagygctgcatgggggagaacagtctaggcaaggtgaacggaagtgcagggtccctgaggcagaaargagctcagcctctttgttagctagaacaagaaaggggcccgtatggctagcataggatgggataggggatcgtggtggataccagctaggatttcactgtaaaagaagaaaggaagccactgaagggcattaagcagggcagtgatgttttttaaagatctgtctggctgccttggggagcatgggttcagagagcagcagcagaagtgtgcaggatgacttggactgtcaccttggggccagcctgcagactggtgtggccgaaggagtgccgtgactcctctgccacctctccacatttggaagattgttttgcagctgcaacctcaaaacagaagcctcctaattacsaggtagctttctagagccaaacaaatgctgttgtttctgacaggtaaatcaagacagggaaatgatgacacattcaccacaactgaagtgttgatggggtgtgttgtgacccctggcttgttccaaagcctatgtgggtgggaattctttaatgtctgcctggaactgggcactcagctataaatagagctattttggaaattctgcacctcaatttctaaaaagttggaaggacaggaaaggggagctgtgtttgagatctcagaaatctgcaccccaccttgctrtccaccactggtattccgtcagtcttactaccccctcccacctctagcccaccctctaccatcctcaccaggaaggaggctgcattcatttcaagaactgcttttcttttatcagctggcattactaggtatagacattatgaccctttaatgggcgatgggttaatacctgttgcttttgtgtgcttcctatttaaaacatgtttatctatcccccacccccactttatccaaaagttattcagtgttttacaaagacatgmatattgggccgggcttggtggctcatgcctctaatcctacctgaagcaagagaatcgcctgaacttgggaggtagaggatgcagtgagctgagatggcrcccctgcactccagtctgggcaacagagcgaggctccatctcaaataaaattagtcagtcaaagacatgaatattttcttctaagtagaagtaatgatgacgatgatggtagcagttatgagcaggtaacatgcattgaacacttatttgctccatgyaatgttcacaggtctttacatgtaaaaacaaccctgtaaaataaataacattattctcttcattctccaagtaagctgaggcagaggattccagcrcaagcaatttggttccaaaacctgcccttttaacctctaccagattttggtgaactctctgtctttggaagggtaggtggcggctgcggggagaaatagatgaagctgttacatttggcagcaaatgtaaatcaccaccttcactggctttaatttccccctccagccttctcgccttgccatcaccttcaccctgtccttcctcttcaggccacctatcccttccgattgaccccactggacttctctgctcctggcttctgtcttccctctagtgaccgctgtctttaccttcagctgcacgagctttttcaagaaccttcttgctccctctccatcctctctgttttcctacttttctttggccactgtttttgccacagcttctaggatttctctttcccacaatctaggagaaaggtagagctctcttatgctgggrcaacgctaccaacattggtattccacagcattccaacgattctaaatactctcccagagtagggmggaaaaatcatccaaactacttggtaattgaattcaagagtgatggaccaaaaattattaatgcattcccttccstccaccagccaaagaggattccatctttattctcctcccaaatgcaggctccattaaccttttacctttctttctttccggtctttcttttctatatctttttttttttttttttgcatttttccaattgtgatcatactatatatgcaatttgaggtatttcagacaacattattacatcattacagaagtctcatatgctgtattttataaatatgtgatgcaatcaatcattgataagatgtactgttattttatgtttcactaagagtgcgaagaacattgttaattatacaatgatccaaaaatgtcttctctctcagaatgtattgttttatatctattagaaaggctcttttgacttaggcatagatttctcatacatcaggccatttctatgcctgcctgtgaacacagggattttgaattacaatactgaatcctagtgtgatctttctgaagtcattttaattatcacttaaactcaatatggaaagcatcagcaatgcacctatatgcacaaaaatgagcagctatgatcaagttatcaggaaaaaccaaaacaaaacaaaagcacatctccatcatttataatggcccatcatttataatggctgcctgataattggagatacatgcaccagacttgacttaactgttctcttagtcatcagacatttagatttcaacatgctcctgttaagctctccttacagtgtgtgtggcactgtgcagttgaatgaaacatgccatggccagtggaaacaggcttgggctgatggagagggcctacagggccaggccttgaaggggagggaaattgttagctacacgaccaagagacagaagagaggaaggagtttgtacccacaactcagctttattttatgtaagctctttctgyaaagggaaagtagctctttgtaccaaagcaagggcctctgaatgagagctgggagaggccagaatgggcctgtaagaggttgatgtgtatgagacctgaagccctatgcctttgggaaggagaggaaggactaatatttgtgtggtacaaaggatgtgcctggcataccccatatcttttacaaagacataaatgtcttstgaataaaagtatgatgatgatgatcatggtgatgaagatgagggtgatgatgttgatgatgatgatggtgatggtgatgatggtagtatgataatgctgatggtggtgatggtgataggagggtgatggtgatgatgatggtgataagatgctgatggtggtgatgatgatggtgatatgacgctgatgatggtgatgacgatgataatggtgatgatgatggtgatgacaatggtgataatgatgtcgataatgatggtgatgctggtgctgttggtgatggtgatgctggtgatgatgataatgatagtggtgataatgttggtgatggtgggatgatgttgatgttgatgataatgatgatgatagtgatgatgatatcaacagataccatgtactgagcacttactttgtaccatgcaatgcttatggttttttaaatgcatttacaccaaattcttataacaaccctataagtcagtgccattgcttttcccatgtaacgtgcacatcattcaatcactcaacccttgtcataggtagatactattatcctccttttatagatgaggaaaccttggcttagaagggataagctcaagttcacaggcagaaaagagacagccagtcaagccctgactccttttgtgaccctgatgagattacaggtcctcagtctcctcattgtatctgaagactaaagaatcagaaatttgtgactccacttagtttttctccacccmggagccctcaggccgctggtgagtgaagttcttacccattagggattattaatatactagataagagtacagtctctggagctaggcttgtgactttgaacaaattattttatctctctgagctcagtcycctcatctacaaagggggaattgataataggaattgtcgcaaagagctgttttaaagattaaatgagataatagatataaagcacttagaagagagtttggcatttgctaggctcacagtcagtgtcagtggttcccaatgttactgttttagctgcccccagtcaggtggttgatgagttggggagcctggtgggcagtctggaagagagcacagtgactgcaaggtcagctcctgaycttcataataaggactcacatgtgtcggtcccaaggatccccaagggatactcatggttgaaggtgtctatgtgttctccttggtgtccagcgaatgcctcttgacaatctgtggtcatactcacaacctatgaccacatacgaggaagcgaggtgtcccttttgcagttgttcagaaggtcccgtgggcaggagcagccagaggaacatgaaaccagctcgtaggtggtacttgtggcaacagcagttacagccaaggagaagttaaattctaaagacttgggcagtctccagggaatatactaactgagaaataacatccataaaaataattcaatactagtatgtaaaactaaaaacaataaccaagtgtgactggctgtctaagaattaagcaaagtaagatgaagtgtcttttgctagcaggcgctctcagcaaaggagataaggctgcagtaattctcttcccaccttcgatgggcaggtgcaacctttggctgcagaaattctcacttcccagcagcagctttgagcaccctgctcttaatgtttcttgggcagcagcagctagggaagaaactcagttaaggctgtttgaggacccaaggtggtctcactctgcaacacacatcggcagccagtggtgtgctggtaaatgattaacaactggctctctgaaaaacaaacaaacacattgtgcacctatacatgtacacacacagcttattatttattatttctctgaaatatgggtagcatataatttacaaataagaagaagaatagtatacacagtactgtttcttataaattcgagatagtcagtttttaccaaatgcttctgatttttgctgcgctattatatccattacaaaaccattgttgcagtataaaattgcagtatgtagctgtgacatgaatattggttgatattttcatttttattaagaagtaaggcaaaaacaaaataagacatatgtcagaacttcacttatccttctttgctgaattgkataatggttttaaaatacyaaaaaatatttcttcaatttttttctgctactcataatgtagcatctgtagagcgacacacttttgaatttgagttaatatttcytttttattttattttattttttgagatggagtctcattctgtcgcccaggctggagtgcagtggcgcgatctctgctcaccgcaacctccgcctcctgggttcaagcgattctcatggcttagcctcctgagtagctgggaatacaggcacccaccaccacgcctggctaattgtttttgaatttttagtagaggcgagattttcccgtgttggccaggctggttttgaactcctgacctccggtgatctgcctgtctccgcctcccaaagtgctgggattacaggcgtgagccaccgcgcctggcctgaattaatattttctaccccactttcttaagtcgagacaatcaataaagcaataaatgacacctggatttgtagcgaatgtctatttccatggtgtaaatagtggtaccctgagcaattttaagttataaatatgagatcactgaaagtggagttggggaacacgttattatatagtattttcaccacacacaggatacagtmaatgacttcaagagcataggtaacagtaaaatgtagtaaaasaatttagaagtcatgagttttgagtacttagtactttttagtatgatttatttaatagtaaccttatataatgtttttcttttaattgttttattgagatgtatttcatacactttmcaataagcccatttgaagtgtaacattcaactttttttagtatattcgcatggttatgtaattttcatcaaaatctaattttagagtatctttttgtccccctaaaagtaactctgtgcccatagttggcagtttgtcatatcactcaatcactgtttcctttaaagagcttatcattaaagacagcaggcagttacacaacatcttctacatgccaagaatgtttctaatacatgctttatggatttttaaattgtggtaagatttacataatgtaaaatttaccactttggggctgggcgtggtgactcacgcctgtaatcccaacactttgggaggctgaggtgggtggatcacttggggtgaagagttagagatgagcctgggcaacatgatgaaaccctgtctctactaaaaatacacaaattagccaggtgtggtgctgggtgcctgtaatcccaggtattcaggaggctgaggcaggagaatcgcttgaacctgggaggcggaggttgcagtgagccaagattgcaccactggactccagcctgggcgacagagtgagactgtgtctcaaaaacaaaaataaaacaaacaaaacaaaaaaagttcaccactttgaccattttaaagtgtaaaattcagtgacttttaatacgttcacaatatcgtgccacaatcagcagccatttcagaacatttttaccatcccccgctaaagaaacaccatatccattaagtggtcattccccatttcctccttcccccagcccctcataaccacatctactttgtgtctctatasatttgactattctggatatctcatataaatggaatcacacaatatgtggccttttgtgtctggcttcttgsttttagcatgctttcaaggttcatccatgttgtagaatgtatcagtacttcattctttttatggttgagtgatattctgttacatggatataccactttttgtttatccatttgccagtgggtggtcattgtgtttctacttgttggctgttacgaattatgctgctatgatcatacatgtactgtttttatgttttctgcaaactcctgttttccattcttgggcatattttggggagtggcattgctgggtaatatggcaattttatatttaactttcagaggagccaccaaattgttttccacggaggctgcaccattttatatttccacttgcagtatatgaaggttccaatttctccacatccttgmcaacactttattttctgttttctttgaaggtatgaaattgtatcgtggttttgatttgcatttccctcatgattaatgatgttgagtatttttatgtggttattggttatttgtatcttttttaaaatagaaatgttgattcaagtcctttgcccagtttttaactgggtcatctggcttttgttgttgagttgtaaaagttgtttatatattttggatactagacccttatcgtataaatcctttgcaaacattttctctcaatctatgggtaggcttttttactctttttatagtgtcttttgatgaacaaagattttaaatcttgatgaagtccmctttatctattttggatgttgttgcttctgtttttggtgttgtatctaagaatccattgccaaatccaaggacataaacatttactcctgtggtgttatgatatatatagggttcctggctcataactctcatagcccttgttgcagtctattgttacaatattgcstgtgttaggcatcaggaaacagaatctctttgtctcctgtccttctttcacctgccccaaggcaggactctaatcttycccacctttttgattgtgagtcttcagaccctccccagagagtcagtcctgccttatgccctggggaaaggaatgctgacctcatgaagctcycataaaaacccaagagggctgggtttgggagcttccagatagctgaagacaaggaggttcctggagcgtggctgcctaggaagggctggaaagctccatgcccctaccccatacctcgccctatgtgtcttttcatctctgtccttagtactgtcctttataataaagcagtaagtggtagcaagtgttttcctgagttctgtcatctgctccagcaaattaatcaaacccaaagagggggttatgggaacttccacctgaagcccctcagccagacattctgaagtctctgacttgctattggtgtctgggggtatggggggcagtcttggggactgagcctccaacctccaactaactccacgtagacagtgtcaggattgaattggaggactcccagctgctgtcccctgcttagtatgtggggaaagttgagttgtaaaagttgtttatatattttggaaactagacccttatcatataaatgatttgcaaacattttctctcattctgtgggtagtctttttattcttttgatatcatctcgtgatgcacaaaagttttaacaacaaaagtttgggtgttgtatctaagaatccattgtcaaatccaaggtcatgaacgtttacctctgtggtgtcacccctcctctcgcatttggtgagaggagtcttctgtgttgattgtcatggtggtgtgagagcagaagggaaacatggtttcagaaaagagtttttccctgaaaccacycctctattttcttctcagacttttatagttttagcacttatgttaagacttttgatccattttacgtcaatttttctatatagtttaaggtaggcattcaactttgttcttttgaatgtgaatatccatttgtcccagaagcattgattaaaaaagataattctttctctattaaatggtctttgcacccttatcagagatcaattggccataaatgtaagtatttctttctggactctgaattatatcccattgatctgtatgcctrtccttatgccattgccacaytgttttggttactgtactctgtgtaagttttgaaatttggaattgtgaattctccaactttgttcttcattttcaagattgttttgggtattctgggtcccttgtatttccatttgaattttaagatcaatataatttaaattttaatcatggcagtgttcaataactggcttgcatattttttgaacagtcatcagctcttgtgagccacggttggccagctcccaaacaccatgacatacaacttgcaggaaaagctcattttccagtttttccccctccagctgtaggggatatattttygttaattcctgtgaccatatggcagcatggttaggatcttgggcttcyaaatcagacagttgtaaacttaaactccaattctgccacttattgtgtcactttggacaagttacttcacctctccaagcctcagtttccctgactataaaatgctaacaatagttgttctttccttattggacactcaagaggattaaatattattcatgtaaggctcttagtataacaccttgcacataggaagcatttaatacctaaaatcgagtactgttattgtttcaggattattattttttttaaatttattttatttttttgggacagggtcttgctctgttgcccgggctggagtgcagtggtgcgatctcagctcactgcaacctgcttcctgggttcaggtgattgtcctgcctcagcctccctagtagctgggattacaggcgcacgccagcacgcctgactgatttctgtattttcagtagagatggggtttcatcatgttggccaggctgctctcaaactcctgacatcaagtgatttgcccgccccagcctcccaaagtgctgggattacaggtgtgagccaccgtgcccagctcagcattattatttttagtctacacacagtgaacttaaatctcctctagaaaagtcagaaggtctacstacaactttaagagttcagccaaaagagaccagtatctactaccgtggacaaccctatttaacatggaggagataagcagaaactgaaaagaggagcctgttttctctctggcagattaattttctttctttcttcacccatgccttggacatgaaacacaagtacaaaggttcagagaaaatcaaaacaagactgtggtttacaaataagtagtactagtaacatctcactgttggctgggcacagtgactcatgcctgtaaccctagcactttgggaggcagaagtgggaggatcacttaagcctagggttgaagaccagcctgggcaacatggtgaaacctcatttctacaaaaaatacaaaaattagccgggcgttttggtgcttgcttgtggtcccagctactcaggaggctgaggtgggaggatcacctgagcccaggagatggaggttgcagtgagccaagattacaccattgcactccaccctgggtgacagatccagaccctgtctcaaaaaaaaaaaaaaaaaaaaaaagtgaaaaaaaggaaaatcttcgttgttcttcatcagaagcctccacacagggcccctgaaggaagggcagggaagaagggggttggaggtcagtgggaggaataactctgtgactcagtgctttcctgactaccatctggatgtgggctgtatctgcgtaaggtgccgggacagggcggcctcatgaactcatgggaagcaaacacacaccctccctccgatccaccaggcactcgggtttcctgtgtgtctggtgatgtgctgggtgttgtggatctggactsaacggcagtctcaggtttatgtattaggaagcattcagcaggcaggagcagccgatctgagactggcatgggcagtggagacatcattcatctcctgaaacrtaatttggaggagactgttccagggctggctgagtgactccttgatgtcagcactttgccctgtcgtggtcttggcctttctcttgtgttccccagatgggtttcactgctctaaggatcataccttcgcaggccatctgaagttagtgaatctgaggcatacagaagggctgggtgcggtggctcatacctgtaatcccagcactttgggataatgagatgggtggatcacctgaggtcagaagttcgagaccagcctggccaacatgatgaaaccccgtctctactaaaaatgcaaaaaattagctgggatttggtggcgcctgcctataattgcagctacttggaaggctgaggcgggagaatcacttgaaccrgagaggcagaggttgcagtgagccgagatcgcgccactgcactgcagcctgggcgacagtgaaacttttgtctcaaaaacaacaacaacaacaacaacaaacaaacaagaaacaaaaaatacataraagaggccttctcttcacaagtttttcttattgttttttgtttttttaagggaggaaatttctttcagaagtcagtactggacattcccttatttcaccttgagctacacatcccatagtcagcttagccctgtccctggtgcgggggagcaggackgttgcctgtatcccttagtcattgccgcaggcttgctgcatcacaaaccaccattagacctcagtggcccgcagcaataaacattcgattctcgccatctctgggtttgaggtgaccttggctaagctcccctgcattgctctgctcatctttctcacgagtctggcaatggggctgggaatgggctgatctaggctggacttggctggagtaacccagccccaccttggatctctctcctctacttcccacatgtatccttttcatggttaaaggtagaaacagaaaaaaacaggcagaaacataaaaagctcggagatggcttcctattgcttcttcattctgggccagagcaaatcatatggtcgtrctccagggtgaggaagtatgtcccacttacagactgaaaaggtgctgcaagtctgcacggcagagggcatggataaggggttcgtaaaaacttagggccatttaatacaaatttgtcacatcacactggcttggattgattttgattcattgctctgtcgcccaaacagaattataattattttagtaaggaaagaggaaggatacctttggggcagacaatggatagagcttactatacaagtctatagaggcatctcacctgtagaaatcttaagatgagggttagccaaagcaaagagtggttcagggtgggaaagccaaggaaggccaggatcctcaccaagattgccagcagggagctctgattgtccacagctctgctctctgctcaccccggggatttagcagtaacagaatccacactagaaggacagagtgctgtacagacagaaggaaagacgcasacccaaaccttgataaccatggcaatgcaataggaaatctctttatttcgttggtgctcaagtgataccattaagtcccttaagatgcggaatttccttgcccccgctgccccctttctttctttyatcttatctatatatctgtatctatatctaatctattttttgagaaaggctctcactctgttgctcaggctggagtgaagtgatgcaatctcaggtcactgcaactgctgyctcatgggatcaagtgatcttcacacctcagcctcccaagtaactgggaccacaatgcccagctaatttttatatttttttgtagagacggtgttttgccatgttgcactggctggtctggaactcctgggctcaggagatctgcctgcctcagcctcccagagtgctgggattccaggcgtgagtcaccatgccaggcccctgcctctgtttaaatgctcaaacttggtatggaactgcacagactatacggctgcyctccactcaagaatacaaattgaacattgactttcctcattttttatccarttttgctttccagagacccagatatggcttcattttttaaatgaaattttgcaggtcattagctcataatgattaaatgattctggttattagcataaaacacagctgtagtacataagaggtaacctttattgtttaaatattattcaatgtgcctacatagcacmcagcaaaaaaaactttttttcagactattcagccattatggaaataacttataattacattcagaaatgttgcaaatgcaactcatccttgcagtgggataaacattgcctagaagggtttgaagaggaatccaggttagaaacaatgaaaatttttggctgggcaaggtggctcacgtctgtaatcccagcacgttgggaggccgaggcaggagaatcatttgagggcaggagttcaagacctcctcatctctacaaaaaataaaatatttgaaaaaaaaaagtgaaatttttgatatagaagaggatgtagggcaggtagggctcagaargacccatgccatatagcaaagttcttagtaacacaggctttgggttacagcaggctagattcaaatcytgctgtggtcagaatgtctgtgtcaccccagcattcatttgttaggagatggggtcttttgggagatgatttggacatgaagacagagcctgcataattgcatgagtgcccttataaaagtgaccccagaagctgccttgcttcttccaccatgtgagaaaacagcaagaagaatatccatgaatctatgaggaggcgggactctggccagacattgaatttgctgcttccttgatcttggacttcccagcttccagaaccatgagmaataaatttctttttttcaaagctccccaggagtctctctcggtctgttctggctcaggaagctkccttatttgtaacaaacaaataaacaaaaaacaaaataaataaaagctacccagcttagattattttgtcataaaagccccaaaagactatgacaaatccttcyatctatgtgtccttaggcaaaatacccaaactctctgaataccaattttctcatccaaaaaaatgggtgaataatatctaagaggtaataaccctaatacctcttagtgttgctgtgagaattaactaaagtaccatcttcatgtggtcagcacaatggctgacacatagcaagaycttggtaagttatagctgttgctgtcattcctgcagctgttatctttgtcattacgcttactgttattattagctctgctatcagagtgatgctgtggctggagaagatggagacccatgtgttcaggctgtgagcataggcagatcctttctaatgcagaaggtgyagacacagggcacagaactgccaactgtggctgctgacacctgtctgactttgactgggttagtgacaaagaaatgacttkccttttgtatgttagccctgtgcctggcatactgcaaatatctatggttgataaattaatgttatcatcatcacgtaagcatcttgggaagtctgtaagtaatgggagttggaggcttaacastgatctttgagctggcgatttttccagccaactcattttggacgttggtgcttaagcatatcctgttttcgagggtggtgttggtggtggaggaggtgatggtgatgatattgataatgacagcaagaatgtcttacatttatagagtgttcaaaaggtgccagatattgtgctaagtgctttgcgggcattatgttattcacacttcacagatattctctttctacatgtaaggaaaaaaaggcataaatactttatataatttactcaggattttaagtagagggtagattttaagtccaggcagtccaaccccctgaaagctgactctttaacaccatatgcttctgtcttcctggctgttttgtgaatgagtaggatggaaaggagatccttgaattgggaaggctacccatggactacaactagtacttgtcttcaacctccatctagatggagtgctcacaagatcctctacatcaaacctggcttcttagtccactgctgagtcttcccaattctgaaaaaaaggattcagggtataatttctcacacagatttctgggacagtgctttcttggagcaccacgcctcactaatggaacactcatgtataattctggcttttgaatttttatttttttattaacatacacagtcagcattgggtgtggctctggggattcattctagtgggcaagtctcatatttctcaacctcaggtttttcatctgtaaatggggacaatactgacatctasctaatgtccttgaggatggaatgagatattgagtataaagtatctagtagagtggctagcgtatagtgagtacccaataaatgcaatagatgttggcttttattactgtcaagtggaaacaaaagtataaggtttaagtaagcgaacgaaatggaagataattgaggaagaaaatcagatgatgtctaagataaggcaaagaacattttgtgaatgtttaaatatcctaagacccactaaggaagtttgtggcaatatttgctcaaagacagtatatataataaatactttagactggytaagagaatggctctgaatgtctacctagctatcacatttagaaacgccccttgccttccttccaggactttcttccttaatcaggattgacttaactgttaactcctagaactgtcgttgattgcttgstgaagtaacaattagtatagacattcagcaactggcctcccatactgtgattcactgacccagactttgacatcttgggctcagccataccctggagcctccaaatcctctgctggatcctttaagtccagacatctgacaggggaagaaaaagtacaagtttccaaggagttattataggtcaagcctggaagcagtgaggtcacttccacctgcttcccattggccagaattcagtcacatgatcacaaccaactgcaagggattctgggaaatgtagtctggtgatgcctcgaggaggcaagagaartgttttcagtgaacacattgccttctcaggcttgctttctattgtagattgcttacaatattgcttttaaattgcatggtcttgtacaaatgatacgagttttattttgccttttggaaggagttattgtccatatttgttagagatatatctgtttatcagcatcattgcaaagtattagaaagggccctgcctgggctaggagccagaagcattcttcagttcccaacggccatccagccactcattgctgtgtgagctstggctggtcagtaagaacctttgatcccatgtttctttatcttcttctttttttttttttttttagccatagtctcactctgtcacctaggctggagtgcagtggtgcgatctcggctcactgcaaattctgcctgctaagatcaactgattctcctgcctcagccttccaagtagctgggattataggcatgagccaccatgcctggctaatttttgtatttttagtagtgccggggtttcaccatgttggccagtctggtctggaacacctgatctcaagtgatccacccacctcagcctcctaaagtgttggggttgcaggcgtgagccactgtgctgggccccaactttctttatcaatagaagtggggaaatcgtacctgccctgtctgcctcattggatgtggaagaaatgacataatccatgagagtggcttctgaatgaagagaacctgctaaagggaagacatgatctcaagtcagccacctctgacccaaataagaacacataattacaagactgtattgtataatcatgcaggacacaaggtatgcaattttaagggtcaaagtggtaaaaaaaaaaaaaaaaaaaggaaaatcaaatataaaaaggcagccccgacaggtacgagcttgtagtcatttccccaaatgcctaaagtagacccattcccattgctctaatttgtagagatgttctcgaggcagcctggagtcaagacaagagtgccagccaggattgaggcactgttccaactccagtctggctgctttttcaacctggggctttagtcatgtcaatattcctgagcttccatgtgcttatttgaaaaataggaagattygtccagtctcaaggaactatgataagtagcaaacaatatcccagaaaaatctccagtcaaaaatccactggaggccaggtgcgttagctcatgcctgtaatcccarcactttgggaggtcgaggcaggaggatctcttgaggctaggagctcgagaacagtctgggcaacatagcaagtctctgtctctacaaaaaatacaaaaattagctgcgcgtggtggcgcgtgcctgtagtcctagctactcaagaggctgacatgggaggattgattgagcccaagaggtcaagacggtagtgaktcrtggtcacaccactgccctcaaccctgggtgacagggtgagaccctgtctctaaaaacaaaagcaaagtctactaaaaattcactggagctatgagaaatcttagcccatggaatccagtcttctccttttgtttctggggaagctgaggttcagagagatggggtagcttgctcatgttatatagggagcaaaggacagagcttggaccagagcgcagaggtcatgataccaaagccacggcacctttgccacaacgtgagcaagaaaggatagccttgttatttttaatccaaactgaagttatgctttgggcttccagaatctgggtcaaaaagagtagaagtcaggctcagattgacgcttttcaagagagagaaaaaaaaagaaaaaaatcttgcctttccctagctagaggtcagatgtcaaaaaagctaataacacaacccaaggatgtcatcgacaaatgaaaaaactggtgcgatgcgggaacaaaagctattttatcattaatatgccgcttttttgttatgtactcatgccccagaaattattgtacagcctgtacttgagtccttagacagaaagcatcttatcattcacaagcttagctatgcaatatattcctccctccccccaaggtagttgttgttgggtttgtttttttttttttaagagatttacagtgatctttccatataggtttttctcgaaacatatatatttttaatttctcaccatctcaggggtaaataaatatattaaaataagctatgggatgtacagcagagtataacaatgataaatgatgttgtgtgtaatttttctactattaacataaagtaatataaactgaaggacactggtctattgagagacttagaagctaatgttccatatcagatgcggccaatgtcaggactgaatacagattaggcagtgtccttttctccccaggggaattaaagtttgagacaccacttgctgccagtggttttatggcattttgttggggccggtggtgcctttcttggtctattaattcaggagccgtaaacaacaatgtgagcaaaatgcttttccggtgggatgcatttcatttatatgtgcttgtatcgtctataccttgtcaatccattttgtcacaataagtgtttttaaattgtgtagattacctccacttcattatggttcctggcatttgtgtcttatgcaaggctattatgtgaagttaggaaatatttaaaactctgcctttctaaagaaacagggacacggtgcagaaaagttcatctggagttaggcttgtgtcttgcygtctctttaacggagagttcatgggcwgggtacagtctgtgagaaggaatgaaaaccccagggtagatgctaacaaaaatcacttttaaaaaatgtatggtgtccatctgggttagcaaacacatgctcacacgtctgtgcttgctggatttttaagaacttaccagcatttaagrttttcttatgaaactgattttwctcaccagggatagagtctcaaagttggaggtattttatgttgttttaaataatatcgtcatcacatgtcattttagaccccaaaagtccactccgaatctctgcktatggaattgaggaggggtgaggctgtcagaagccgagggacttggccaaggtcacatggctttggacggcccccctgaaccttggagctcatgttctgtggcactttgcatactgacctttctgctcttttatgctgcctgctctctaatattgtccaaaaaccttctctaaagaaagtacacaaatggagagagggggaattggrcatgccattgggagaacaaatttatttagatatctttggctgtgttgacagaagctgcccaattawacccaatatacaaattttaaatgcatattagtcaaagttccagttatgtagctttagaaaaatttctatgtgaatgactacttttccctgaaatacgtcctccatctcaggcactagttaggaacttcccccgcgtctggcattgcaggtctgaggttccgatgaactcttttttctctccttccccattaaaatgggcagaagggaaggaacacttgggtttcatcaagcacattgttatccttcgggttggctctgagatgatacgtttgtcacggttcataaattttatctttgcactaaaaacagggttagaatatcttcaatgcaattataaaaatgtattaaaactgagaaggagaaaaaatatggcggtagatgcgattttaatgattgtgtaaatgttcattgttccatggcaaaaaaaaaaagtcgagcttttcagccacagtatttcagacaaatgccagggcctgtttttctgtaaatgtgtaccgtgtgcttttaacacaaagacaaatatgttgctttaaaattccgcttggaatagagtgaccagctgtcgttatataatatctgcaggctatgattgtgtaggtgcctgtagtcactggctatgaaaatggccccaaataaagtggtatccacacttcttctttctcctacgaatttggaggtctaggaacgggggtaagcctatatggtcakaattagcctgcaaacgtgaattaatatgcagaatctgtccccactgtgatagaatttgccattcgcttcctttgctaaatggcttgcagtggcagctgacggccaaaggggaagctgagaacagcaaagattcaactgaaaacattttagggggttcctgacttcaggcctcttttcagaatgagggaattrtctaaaatcccaaatgcattcttagctaaggtcagtgtgtctgggtctgtgtcaggcatgtagcagccacagcaaacttctcttgagatagcatctcctccccagcactcacttgacagattgtggtcagtcaacactcagtctgatagtttagaaagcttttgcaaggcattccccaatataaccattaagcatcaaactctcaaatggaagtttcgaaaaacagaaaaaagtgagcataaatgcaaactatcaccccatgtaatagtttatttatttcatgctccacttttctgggcagttttgttgtcattctctctctacctctttttttttttttaaagacagagtctcactctgttgcccaggctggagtgcagtggtgcaatcttggctcactgcagcctccacctctgcctcccaggttcaagtgatactcatctcaagtggtttctacctcattaaaacaaacaaacaaacascactcaccatttttgtggtgggcatggtggctcatgcctgtaatcccagctctttgggaggccaacgcaggtagatcccctgaggttgggagtttgagaccaccctggccaacatggtgaaatcccatctctactaaaaatacaaaaattagctgggtgtggtggcatgtgctataatcccagctactcaggaggctgaggcaggaaggtcacttgaacccaggaggtagaggttgcagtaagctgatatcatgtcaccgcactccaacctgggtgacaaggctagaccctatctcaaaaataaacaaacccttgctattttagcttccgatgaggatatttatccttctagcatttgaatgcagccaaagtccttactgggcaaatttttgagctctcaccccacattaacaatttctctccttaactttgtttctgaatgaagttatccacagagttttaaagtgagtggtgagttgtggatacctcttccgagcaggtgcacccccatcctgccattgtccctctccttagtgtatatggattgatgacatttcagtttcagacaaagggacatttcattttttttaggagattaaagctgtgtaagatatacaatttaaactgaatgttgatattttatagattgttgagtccgattgtcctgatctaaaattaactggttttgtgatttggtgtaaatcgcttaacctctttcaatgttttttcagcaaaatggggtaagaacagaatctgccttgcagagaattaaccgagatgatgtgtggaaagggcctatcccagaggctggtgtaccatggtggcttctyctggctctgctggttattattattagcattattgtcattgtgaaagtgacaaggaatgtgcctgtgcgtgaatctcactcttagatcagacgtgcttttgaaatatccagatatatacaacacaaagagcgaagtttgttttatattttgtttgtttaggttttttttttttttttttttggctggtgtttactgaatgcgtgcaaggctttctgtcacaggctctgtgttaagatatttaacgggtgtttcattttcccagcaatgctataggacacagaaaggaacataaattgttacagagagaaagagggtaggtctgtgaatrgaattgaacaggtaggttgaacaagataaatgccgaggaagcaagtgtatttaaataaacagtagtttatggaaggctttggaaatccactatattaatctggaattttatgaaattttaccagaacttaaattattaatagttgaggacaaagaccaaccattttccccaaaacttagtcactagttttgtccttaacaactaattaataaatatttgtgaatatagtgagtgactaaagtaatgcattaatggttgaatggctggccaccgtgcctcatgcctgtaatcccagcactttgagaggccaaggcaggcagattacttgaggtcaggagttcaagatcagcctgggcaatatggtgaagccccgtctctactaaaaatagagaagttagccaggtgtggtggtgggcgcctgtaatcccagctacatgggaggccgaagcaggagaattgcttgaacccaggagggagaggttgcagtgagacaagatgatgccattgcactccagcctgggtcacagagcaagacttcatctgaaaaaaaaaaaaaaaaaaaaaaaaaaaaaaaaaacagaaaaatgaacgagtgagtggcaagaaagatgaaatgattttcatcaccaggcctgccatggaattcatggtgccttgtactgtggccagtaggtgcaagagtatctagtaggtgctttatttttaaaaaatgtcttggaatcagtcatagtttaatatcaattatatataaattagtcttgcaggatccaacagttctgatttattccactcacacaacaagtcagttcttaacacaaaccacataggttcttccttaaataaaaagctgtggctatgaagaagtgagagtttttttttttttcctctccaaaccaccacgtgctcttgtgtgttattgtagtggcttcgcagagtatttatttggccagaaagtctatagtcaaattgctcttcattctcaagtgtagtatttatttctccagctcatgcagaattctgttttatatggaggttttaaatttgtgcagaaaagtattacgtgggtttcaaaggtactcttttttcttttttgagacagggtctcgctgtgttgcccatgctggagtgcagtggtgcgatcacagctttctgcagcattgaccttgtgggctcaagcaatcctcctgcctcagcctcccaagtagcttagaaccacaggcatataccaccatacctggacatgtttttaactttaatttttatttttgtagagatgaggtctccctatgttgcccaggttgctctcaaactcctaggctcaagcagtcttcccaccctggcctcccaaagtgcaggcattttaggcatgacccatcgtgtccagcctaaatggcattcttggaagtaaaaccacaggggatctgttggaagtggcatgatggaggaattttaaaagaattgaacaaataaaatrgtcagagctcaaaaattgagtactgcttygtttctcccaaataaccatcaccagacaaacaggtgtgtgtgtgggtgggggaggtggcctggtggtacttcatgatcttggaagaaggaaggcgcccctccttcttagctgattgatgatgagatagaaagatagaaacagccccatcactatgagatggaaacmcttctttccttcakctgacttccctctccttcattcccaaccaagtttgaccccgccgcagtggagattgtggcagatgggtcagatagcatgtgtcctgtcgctgtcacaastttttaataagggctgggggtcctcttgaagagcccaggaactgcagtccctcctctatgccttcccctgaacacagtgcrccctcactaataaattctgagggctgacactgcctgagccggctggtctttgccctcaatttcattgagatgggccattgaaaactcattacaagctgtttagactctgactttgacttttgctcggcagcgaacaaaattaacagctcttggaggtaggaaaaaaggcgctcagccaaattaaaaaaaaaaaaaagaaagaaagaattgaaatgatgagaaaagacttttaatattaactccattagtcatgcaaacaagcgcacatgcgaagcgcatatgttctgcgtgtggctctcatttggagcctgatgagaactgtggtttctcccactggagggaaattcatacccaggtcttacacgtagctcaaaatgttttacatgtcaagcaatgagcctttgagtgtagcagaattgcttcataaatttaactatcactttcaaatttctgttttttttctaatttagtgcttgatagttttttatgtgataattttaaaatgctgtttgtagcaaaagttaccttgatagttcaggtgtgcagagaaaattcacagccatcaatagaaaagaaaaaaaaatcctgtttataccttaggcattctgtgatccttasgatgtagccatgacagtattacgggttttaaaagccacccaagtaatctaaatttcctccaaactaacaattcctgaaagattgaaatattgctaccaatgtgtacggatggtttccattgatatttgggaagtttccatttgtatttgggaagctttgcatgagcaaaatgcccctttctcctgatatttgcaacccatcttaaaaataaaagtacttttctgcatgtggtcttgtacatgaaattaagaatatcactaccaaaatatcaaaatttaaggactagattgtgaaatgtttaaggtaggcaaagaatatttaaccaagaaaggaaaagtgtatttgagagagacctgatgagttcaccactgcctctggagaatcaaatccaaaacagcatatatatgtatattttttagagacggagtctcaccctgtcgcccaggctcgagtgcagtggcgccatctcaggatctcggctcactgcaagctccgcctcccgggttcatgccattctcctgtctcagcctccggagtagctgggactacaggcacccgccacctcgcctggctaatttttttttttgtattgtttgtatttttcatgtttttcgtagagtcagggtttcacagtgttatgcaggatggtctcgatctcctgacatcgtgatccgcccgcctcagcctcccaaagtgctgggattacaggcgtgagctgacgctcccggcctacagcatagatttgaggcatcttgaaggtagatgcagaagagtgggatctactttggatttttagattaatcactgttaagacttaaacagcttcttatttgggtgaaacatgggagtgtcaaaaataagtcactgtcactctttgccaacttcctttaactctttatacggctatatctccatagatatccagtttttgttttgtttttgtttctgttttcagttcctctccaaactgtcaaggacagtgccaagatctgcgaatatagaaagattaagagtttttttctgccttgttgggtcttctttctagcatgccagsaacatttttctcatcttttgaacattagggamtaacacccaatgccaccctataatctcgagacagaagtggaggatcctcttaagacaagaaatctttcaaagccaaataatgaattaatccaaagccacttgaggctctagatagatcttagcagtcaaagcaataaatatataatcccataaatctaaactttgtggtatattcattaggctgtctgttttcttttctttcaaatgtttcacttaattccctgatataataaggcttccaaattcttggtgtttttctacaaccaagaccttgaacttttkcctctcaggatttctttcatgagaacccattttctggccatttggatatcattgatgagggaattgaagcatttccctattctttagagtttcattaaagtttgactatattccagtaacaattgttgcataacaaaccacccccaaatttagtggcttaaaacaacaacatttattttgttcaggaatctgtagtttcagcagggctctsaggaacagcttgtctctgctccagcatcagctgaagcagcttgaaagccagggtctgagatcatctgaaggttgttcactcatgagtctgaggawtgatgctgactggtgggtgggacccttgctggagggtctattggctggaacacctacacattgtctccatgtaccctgagcttcctcacaatatggcggctgggttccaagggtgagcgtcccaagagaaagaaccaagcagatgctgcattgccttttatggccttccatagaagttacatagccctaggttttcctgcattctattttttaggctgtcagacccaccccaaccaggtttgcagtgagaggaaatagaccccacctcttctggaagagaatgtgggactggacatactgccatggccacttttgaaagatacagtctgccacataagcaaacagttcgtgtcctgcagtgggatattgggaaaagaatggtatttggcaaggggtcaggaaacctgcttttgaatcctacctctgcctcttactagccacatgactgggtcttagcatgctcatctatgaaatgggggacactaatgctgaccccacatttgtgctgaggattatgcaaataaaatctgtaatttgtgcaagcatccaccaagtgcctggtgcagactggatgctcaataagtctttggtgggtccatgtattgaattggaatctgcacattatggccattatttaggtttmttgtgtcctaatctatgtcactgagtacatccttgctgtttttcatgaattttccactgagtcgcaacatgccactggccagtgaaggtcaggcaggaaacagattaacaacatstcataccacaatgtcaaaatacttaaaagtgtttacagatgccagtgacacccagtgaatctaaaacaagaggaccagagcagaagtaaaactattcttgttcttctaagcttgaacacaggccttgatgttttatgattgttttaaggtccattaatcgctgaatcatgaggccatgtaaaaaaatgacagctataacatcaagggcccgggtttattttaaatgtttttgcttctacatggattctaattaacgacagtggctaaaacctgattcaaatgtggcaaatgtggagtgccatgggatgaagccagtcaatttcatctaggagcattttatggcttatggaaagaaatattctcttagattgaagggcgccagcctgtaatgggcatcagctgattctcagaaaraagaaacaacgtactgttacataattggggcttctccaaagtggcctgaccaaactgtagagctgcttgtttgtctgatacggtagccattagccacatgtggctatttaaactgaaatgaattaaagttgtataacatttgtaaaaatcacttcttcggtttcattaactagcctcatttcaagtgctcagtagctacatgtacctaacacattggacagcacggttacagaacgttttcatttcatcggacagtttaactgctttggagactggttctcctttttctttttccatgttcactccagaattaaagtcaaccagttcaaatgtcccatctttccccacagacatttgtgctcaaaggcatccccttccccatttggagactctcctagggcctaggcccaagcaaccaggactccctgtagtcaaccccactcctcaatttttggcacccatgttattccacctcaagatcatgtcctcttttaaccyctctgaatatgctcctcctgtgatacccatagggaccctgaacctctagtcctcaagagcagtcattcacccctttggactatggatccctttgcaacccaggaacaactactgtatggccacttcaaacctgtatatgctgcaagtattttatactaggtagggtaaataataggtcttagatataggtgcaaataattttcaaatatgggtaaatgctattgggatgtgtaaagtagaaatccattttaaagcgttattgaatccatactaacctgatcattacatatttactaattgatgattactaaaaatgtggacctttgtgaatttccgatgtcayagaagggtgttcttaactggaaaagtcagtagccaacattctgggaagtagaggcctcttcctcactgcttcattggtttaaaataaactccaacagaaaaacatgccatcatctttaatttcctgcatcagctaagcatttatttcatgtagtcctcacactagattgagtggttccatattaatatcctacgtcaaagatgagtaaattgagatgcgkaggttctaatttgcccagtgtcgtggtgtgtgatcttgaccactagcctaaactgctattttatgtccacccatcaacctctacggctgcccctcatttgaacacacaaaatatagttgtgyggcttggtggagccatctaaattccgttaggccatttgccaatgctgctattaggggcgaaatgtcatgcgcttgatctaaatgtacttaggagaattctcaggacctgatgaattattattcggaattttatggcctcacaggttgcaggcttcataccaactgcagctaatgagctatgggccccgagaaacactgaggacacacggcgttctgcacacagagtgggctgtttctgtctgttctccccctgcacccttctcagatgcaatctcaagtcataggagaacttgtgcaaatgtttctcctggatggtttcctttagagcatgtgtcctataacttgaaatggttgtctgagcagaatgtttttagaagttagatttttttaggggggaaacaggaaccaaagcaaagccaatagagatcttgaaaaaaaaaaaaaaaagaaaaaaccaccgtggtattctaggaagaaaaaagcatttttcgaatgaaaactttttatkatatttgatatattctgcttcccttccctagtatgtattaatgagatgaaatcacttcttaattttcaggttaatattaaagttgaagcccatccctctaccctgaggactctgccagcctctggcagtattcctttccaacttccacttgccccaaataggtagaagttagcctttatttttggtgtcatgtcttctttccctcctcctatcagtttttcagaaactscagaaatttaacctagtacacaggggccccccacccctgtttccagatgccttctagaaagaggactgggagtgtgaatgaggccatgtgggctttgtttgaccctgtggttgtcatgacaatttctcaaagcttagctgggacaggaagaaggaaggggaggatagcggtgtgttcagtgtgtgagctcctaaaagctcttgggtcactgttcccaggggatgatgaccctctatggcagatcagttgcatgtgcatatgagctttccctcctcccgtgggttagcatgttccacactcaccttctcaaagcaaagtctcccttaggggacccttggtatcctgttcatctggcaaatctcagcaccaatagaaacaccaagaacatggattcatcaaaggaaaaatgttgaagtttccatttttatgcttcctggtaatccttcagcccttgatggaaatttccaracctaaaccagtgaattaagagtatggggaagaggagccctcatacagttctgttaaatggtcctttaatattcttcttcagagtgacgggtaccccttgcctatacattttcaaaactacactgaaaatttcaaaacatttctatcagaacacagtcttattctcagctgatctgcaatttccacctggatctgttaaatggcagcttagctatgaaatatcatgttctgcccaatcacctaccctgcctcatatgatcagccggtatatttatgtggacacrtgcagccacacttgtttttaacatttgagaatgacagcgtattggcagttcatataagctatcaaatattacatgtcaactcagaaaacatccctaggaagtattatgggaaccccctgtatcacttgagattcttggatccatatttgctgttaacaaaataaattaatagtcaacaactgattaaagcatttccctgctaccatgattgccttgacaaattctgcagtgctggagtattttacctcccattatttcttccgctgaacaggacgtttggttctaattgttaagcctgcctaatgctgattgaagcgggccatagtatcaagggtggaagaaggtgggaatataaactagatttgctcccttctgtaggaataactctatgaagactttctttttggagacaaatcatcttatgcaggggggaaaaaaaactccctaaaaaagacaaatgacagcgcaagatccaaaaagacaagtgctcagtcattttgtcataatgccagaagagacagtaatgctgtgtggactatgcattcagacatttagaaaatattgcaggcagagctggggattccgtggccagagcatatttggtgaaccgaggacgcatcaaagagcttctctggtgttcagtaacttgcactgtatttcagaggtttataaagggaagggacaggaaagcagtgtgccagtaagacaactcctcttctcgtctggattttagaggaatgcagtgaacaaatgatgaaaaagtctgaagggactttggtaattcagtatccgaaaaacaatcagtgttttgtgacattcttagttgtgatctaccttatgttgtatacacatggtcactcacatacataggtrtattattctgcaattgctgagtaattgatgatcsttcattctctctgtgattcataggctctctgggttggataaatcacttcggggaattatatctactagtatatttatgtcactagaattcctttgagaagctatcactgtgtacatttactgtatctattaactttcttcatctccctcttcctccctttcttcctttcctttccctttcctttctcctctcctgtcctttctctctccctccctctttcttttctttctttttcctttttctctctctctttccccctttttgtatttctaggagaaacggggtttcaccatgttggccaggctggtctcaagctcctgacctcaggtgatccacctgcctcagtctcccaaagtgctgggattacaggcatgagccatcatgcccagcccccttgtcctcttcttataaggctactaatcccctcatgaggggacccatcctcaagacttcatctaaacctaacaacctctccagggtcccacacccagataccatcccactgatggtcagggctttgacatatgaatgaggggtagagggacacaaacattcagtccctaacacttggtcaagttacttaagcttggtaagcctctctcttcttactgagtcatgagsataataagatatacctgttagggttcttttgaggaataaatggaatttttaaagaattgtgccagacatgtaataattacttgataaactatagctattataacaccatcaaagctgtggttcttaccctcatcattgtttaccctctcacacagtaagatctttctgaaaaggatcaagtctcattctcttttgaaccccaaagtccccagccaccacagagaccaaatacagtaggtaccaatgcatggcaatgcataggaactaggtgtcctaacttggcactgtatctgccaattttttaaaagacaagatgacatcccaaagattggggcatatttaggataatgccccattctgtgagggtggacattatagaggacatcagcagccagccacaggccatctcttggtgccattgggttttgagaccctcagggtgacaccgatttaacatgacaggtcttatgttcttgggtaatgtcaaacaacttcttgaaaatatttgttaaaaaaaacccaaaaacagaaacatatctgactgggcatggtggctcctgcctgtaatcctgacactttgggaggccgaggtggacggatcacctgaggtcaggagttcgagaccagcctggccaacatggcgaaactccttctctactaaaaataaaaaaaaaaaattgccaggcctaggcgcaggcacctgtaatcccagctgctcgggaggctgacgcgcgagaatcacttgaacccaggaggcgaaggttgcagtgagccaagatagtgccactgcactgcagcctgggtgacagaatgagactccatcctcccaccccctaaaaaaaaaatctatccaaaggccttgactaatgcagaatcagcactaatttacaagccccataaactaaagaccccatgtttgtgttataagttttcaaactttttaaatattttcccctgtcttattttctatcatttcacatcttcttaaacacatatatttttaaaagaggttttgactcactggtgaatttgtcttaaaatggaaaaataaaatcaaatataagaattttgttatgaatctttggggaaacacaattagggaatctaccttaataggtaaacccatgtaatttcttatttccgtctagttataggaaaatactgagatacttgtgagatgttttctttttttttttttccaacttgtatacacgttgttctataagtggttgattgtttttyaggaaaaaaaaattcagcatctcaaatgtacctttaatattgcttctgatttttgttgttttgctatcatagcgttacctacctcacagagatgttttaggtcataagtrtttttcatttaattttttttccccttmatttcctttttttccctcctaagctataaatatacagccttaaaaaaaacactcagaaatttaagtccaagaagcctgcttttcttgatacctttcaagtgctagattaataacatttttgtcaggtggttaccagaatggaggatacttgagctgagttttgctagagtccaagatcatctattctaatttctggggacacatattttgtcctggttagagagatatataatgatgcctatctgattctgtggtggtctggctttgatgtatgtatatgtgggcrggaatgtgtgtgcgtgtgtgtgtgcatgtgtgagctyctgtgtgtgtgttcatcacgtatccattgtgtctccaaggtcttatcaacagcaacaaaaggcctcctttgagatcaatcacattcattcgatgtttgttttctactacctgatacttactgctttctctttgtcgccgttaattttgtttgtcatatgtcagaccaggatgagtggggcacatacagattcagctcattttattttttttctcccttccttcgtcaccacctttgctaatttcaggcggtcagcacatttagcaagcatgtagctgcttgcctgagcaagccattaatctatattagaaaatgtagaggccccagtgttaaccttcctgaagcttgtctccccacccccaattctataggttctattatatctccgctggtttaaggcaactgctgtttcttttaggagttttcttttctttccttgctgaatatctgcacttagcaatactgcccaggcacatgggctgtggctcaagttttcagtgcaggacagtgtgtcattgcaggagaagacagaacccggccagatcctcccgctgccggcaagcggagtcagttactgggaagccataataattctktcttctagagaattttggcaaaaatgtgcctccatcttacatcaacaatttttcatctttctggaatttttatttccccttcccctcttgttcctttttatcctcctggtgaagtatctccttttccctaaaaaactggaaaaaatgcacttttctatattaattcaaatcatattcaaaaaatactatatgttaaaaaatacgatgtttctgtaatccttacatcccctaataaaaccactgtgtgatgaaactaccaagaagcctctcttgaaaaaaaaaaaattaagtgaacctctactttagaatgttggcttttcatatatgtacaaaacaaaagaggttgcagtgatggcgtggataaaggcacctgtgtacttttccaacctatccaatttcaagatgtatcctttgtggattacattggttcttttctatggaatcatgcaccttagacctgggagaaaccagcgtgacatccagggtcaaggttttccaatcaggtattttgggggaaaaagttctgccttcatgtaacaactaatgtgacatggcagtgtataagacattacagccaaggccttctggttgaagttggggaactgtgggcgttgtccccactagtcctgtcatctgcccttgcaaaaccacccttgggctctctcgcgtgcggtctgtgcaccagctacctttgtgctccccacattcttccacctggcctggaagctgaccatagttggctctcttgccctttcttcttctggttggatttagcaatttaattttcaggcttgctccctgcagggtgtcacttcaccaccttcctctgtagaaggtttcgtccaggccgggcacagtggctcacgcctgtaatcccaacacttcgggaggccgaggtgggcagattgtctgaggtcaggagtttgaaaccagcctggccaacatagtgaaaacccatctctactaaaaatacaaaaattaaccaggcatggtggcacacacctgtaatcccagctacttgggaggttgagacaggagatttccttaagcctcggagatggaggttgcagtgagccaagattgtgccactgcactccagcctggctgagagaatgaaactctgtctcgagaaaaaaaaaaaaaaagaaggtttcatacattttagctgacaagggcaggagctgttcctgctgttactaactggagtacattgcatgaaaccttgctgtttccttaaaccctgcaccgacctttacaaacagtgcctttactaaacactttttacgttacccgttttgagtgtaccatctgcctcttgccaggaccctgaccaagaatttgaaatctcagaccatgatgacctccttgcccaatgcgtaagctgtcctccaaaacacacatttatgggggcagagggagtctctctggaaggaaacttcgtctgagccatggctccttttgcttcccctgggttttaatccttccttcccttcctgttcttttaaggaaatctgaaaaggagcaaaagagctttagaactgcaatgcatctgtctgaggccaaggacagttgtacgcagacctctctgccagtgtttcagtgaccctcctcttgctgcttggctgcctatgagtccatgctgacatctggctctgtctgcccaaatataaacttgagagtgacttccaagatatatacagggctcagaggttctctccccaacccattcactggccctgctctctctcgatgttcccaagtctcctgggtgaccttgtgtgtccttcctgggatattgctcaatcaccctagaactgtaaggccaagtggtcatagccagaacatggcagaaacattcctgcttctattctgcttttctagcatggaatcccctctgccttaatgtgaataaatactccccaaaatgaaggcagaatccagtatctgttgtttaaactaaatccctaactggaccccctctgataaaccctctgataaagaattgatgtaaaatttgggacgctggataggaccaggaagccagagaaagagggcacccttttcttttctagcatttgagttcccaaagaagtaaaactctgtgaatgttcacttcattttttcctgatatatcgaggactccagatgtaacctcattgatagtcttggtgtgttcttcagtatttgtgcttttaatagatattgcaagtgtgtttaatgtgaaaatagaaatggagggcttttaaaagagcttactcaaaatcctgccaattactgaaatctaccagacaagaaggagccactcyttttttttttttttttttttttttttttgatacaatgaggggaaatgtttcttccacaaaagcctggccgtttgtctttaaaaattttcatcttttgggtactgagttgtaatagtaaatacagatgtagctgtgtcacattaaaagcacaaccaaattgtagtacaatgttcaggacacttttatgtcactttaaaatgtagagtatcatctaaaaatgagcaattgctgtgaagaaactggggttggctctgattttgtggctcagttttttttggtttcttgagaagatcatctttaagtcaaaagttatgcaatgccaagtactcatctgtgtaatctatttcagtttccaaaatttttcatcacctggttacaaacatctgaaggcaagaaatagccaagattccattgcaagtcccagagtaagttattattagacagaaacaaacaagtaaataccttgggcctgagctattgcccaaaccagtcctgacttggcttgggttctgaccaactgtttttgatcccacagtctgaagtacgtttgtggaaatacaaaggtcaaaccttcccctaaccctctgtaatccctggtggagctaaggaatgaaaagttgcttaaacattttcctgttgccagtttttcttaaacattagtgctattcttttttttttttttttttttttttttttttccttcttcaaccctgactctgattcacaaagaatagggaagcttagccaactgcagtttcaaagtattgcttcttaagcctgggccaagtgtgtagacttgatagaattctgattaatgcatcttattacattaattttagaagaaaccagaaggcatttctcctattcctagtgcaggccagcctgccagaagcatttgcctccttaaagagctaatatcttcagctaccaacaatcataaaactgaaagatctatcggaagagttggcttctctggatgtgcataaggcacactgcaaaatagatgtacagcttggctgaactttgcttcaaatttgccaatcaaaattcacgaacccatgccaagttggctacaaaacctctcgcttggagccagcactaattatgtcaacaagtagttcaagtttagcccctgttaagtcctgtactcctgggtattggggatgagtctttgtgtggtggcaaacgggccctgtcttcgcttggcttcctcctaaaattcccaggacctcttcgggtcccagccctttctsttcccctgagattgcgcctcctcaccctctgtcttggatggaaagagttccaaggcagtccagtcaccccagtgaaaagttttctgatgaggtcaagccttcttattgtcataggtcattttctttagaaatgagaaaccatctcattgggctttccaggaaggagactctgagtgcaagtttgttgtgaagaacacgtgccttggaattaacacctatggaagggaagaaaacgaagatggagtgggcagagggagaagctgactgagatgsagtccagcaagggtctcagtcaaccttatgaagctaaaagggcccatcagagctaatccctattgggctaatgtggccaggcttttataaacctgccttgactcgtgattgggtgggctgccccaggaaggatgtgcccttgcagaaggtagtctctgtgttcaggtactccctggaaaggctaatggctgaaggctacaggttaccctggaagggagacctgggctgcacatcagagcccatctactttccagtgtggacaagttccagctcctgccccagccctgccacaccatcaccctctccagcacacacagcccttctctgttgattagggttggttgagctgttctaccaccttcattgactcaggccttgaagtgcagtagaaagccctaggacaaggcaggcccagttttgaggctgggtgcagaggctcatgcctgtaatcccagcacttcgggaggccacggcaagaggatcacttgaagccaggagtttgagatcagtctggccaacacagcgagacccaatctctccaaaaagtttaaaaatcggctgggcatggtggtacatgcctgtagtcctagctactcaggagactgaggcaggaggatcacttgagcctggtaggtcgaggctgcagtgaactaagatgccacaggactatagcctgggcagttttgagtgctgcctctaccatgtaactagcttgccagtcaagtcattaactattcggggcmttagtttcgtctttyctgaattggagccagtatacgtaattccaaaggttgcttttaagcgtaagtgagaatattggcagaaattcgttagcactgagagagggaatgtaaagtggaggttaagtgtacggcttaagagcagagtcaggaaacctagacttgcaccctgatttctgagttgaatgttccagggtaagccacttaatctctctaatcctcattgtgcttagctctagaatggaggcttgttgagaaaattaaatggaaacgataacggcgaagcacttagcacatgagcaggcccatagtactcaggtgttcattccacagaaaagcgttcactcttctgcactctttctcagtcagttggccactgctgttcagttcacttcttttggatcttctcagccccatcaggttcccaggtgaaatgagccccggctcagcaggccagttgtcttcagtgacccccagtgaggcagcaggtgggacttgattctggaggcaagactcaactccatagacagggcttacacaccggaccaaattgaggactagctaaaacagggatagggtgggtgcacctttccatgagctgtgtccgccagtgtgtcatgtcagtttacaatttccatggcaacacctagaagttactgcccctttccatgacaatgacccaacaacctggaagttaccaccctttttctagaaatttctgcataatccaccacttaatttgcatataattaaaaatgggtgtaaatgtgatggcagaactgcctcggaattgccactgtgggtactctgcatgtggggtagccctgttttgcaaggagcagcacctctgctcctgttgtacactgtcccttcaataaaagttgctaacaccaccaccttgcccttgaattctttcctgggcaaagccaagaaccctgttggcctaagccgcarttctggggttcgcctgccctgcatcaccagcacagtggaaggccacaagctcacagcattttcatccgtaaacaaagcttggcaatatctctgatggttaagagcttacgtgtttgcgccagtgagacttgcactcagtcttctttgagtgagacttgaactcgattctgagtctcctccttcctagatggactcattatttacttatttatgtattcactcatctattcattaatttatactcttagtttgatatcaacatctgtaaaatggggatggtaatgtggtgatatggaggaaaataaaataactctggcattgttcttactatttacctctgtactgtcatcgttatcattcctttgataaccgtgagcacctgtcatgggcctggcactctagtaggctctcaggatgcacaatgaccctgtccctgcttgctggagacataagagaagcccccagccactgacatctgggtgttgtaagaaagcaagaacagtcatggacactgctaagttttgatgccaaagagccaaatttgcagtaccagaatgtcctttccatgtgtgacccaaagttttggctactgaagacgttgcatgccctccaacagtggaagtggtgccctgaatacgccagaaataatcgtggagtcaacgaagatctgggagtattgtttggagacatctcagtattcctaattcattttcccatccttaaataaaaatctttcttactgatgatctgagaacttcttgtaagccccatttccatgagtagagttggccattgcccactaagaaaatttaggtggtttttattgggattagtggatgaacttaggattagtgtggcccttccttgagatataatgacaaccttsstgaaagcaagaccacagggcctatcttcagggaagtgccttgcattttaataccaaccatgccacgtgtatgtgtttcctgggcctgccataacaaattatcgcaaactgggtagattgagaatcattcattgtttcatggttttggtggccggaagtccaaaatcaaggcgtttgtggggttcgttccttctggaagctatgagggagaaaccatgccatgcctgtctcctggtttctggtgactgctggcaattcttgatgtcccttggcttggaaacaccacattctaatctctacttcctcccttacatcaccttctcctctggctttgtgtcctttctgtctcttacaaggacaccagtcrttggacttaggacccacctaattgagtatgatctcatctcattccttatcttaattacatttgcaaagaccctgtttccaaataaagtcacattcgttggttctgagtgaacatgtttctagggggacactattgaacccactgcactgcatcaaacgtatgggtgtgctttctcttggcctttctcctatttgccttctctgtgttgggaattgtggcttcacacccatctacttatccctgcatgttgagcatcgtctgttacctgaagagcagaaggatgataaaagtgaggaaactgaggcacaggcttgccccaggttacacagctagttatgatggagggtgggtcggaagccaagcgccccccagcccccaccccacaacaggtgtatgtggcctctggtttatccttctttccccctgctcaccacatggcttctcattttgaaaacccrgtggctaataaagtagatgagtttcaggattgcaaaatattgtgatcctggcctttgtccattgtgtaatcttcacagtgaccagagtgtttgcagttcctasgaagttcacccattcccaacagtgtcccagggtcaagctcagatgacctgtggtatttttatacccatatatgtgtcaatgtttataacttttaaagttgttttcaggaagcactgaggcatgtggtcrttcacaggtgacaaagacagaggctcagggaactcagttggttgctgagctttaaacccaagtctatttctgaggctggactgagtctttgagaaaatgcaaagtaacctagcatagtgtcagacacaaaatagtcagcaaataccatcgtagattcaggcttctgagtccaaagctaacaattctcatctccaattcccatcttcaaatattaaaataaactttttttttaagagacagaatctcactgtgttgctcaggctagagtgctgtggcatcttagctcacagcagcctcgacctaccaggctcaagcgatccttctgcctcagtctcctgagtaggtaggactataggcatgcaccaccatgcccagctatttttaaaatttcctgtagagatggggtctcagtgcattggccagactgacctaaactcctggctacaagtgatcctcttgccttggcctcccaaagtgctgggattacaggtgtgagccaccatgcccagccttaaataaactctttagtgtcaaaaaatctacgtgaggccaggtgtggtggcttacccctgtaatcacagcactttaggaggccaaggtgggtgggtcatctgaggtcaggagttcaagcccagcctggctgacatgacgaaacgccatctctactaaaaacacaaaaattagccaggtgtggtggcatgtgcctgtaatcttagctactcaagaggctgaggcaggagaatggcttgaacccaggaggcaggggttgcagtcagctgagactgcgccagtgtactccagcctgagagacagagcgagactctgtctcaaagaaaaacaaaaacaaaaacaaacaaaaatctacttgaaccaataaaaattcccatccccacctagaattctaaatattttataaataaagtcttcagagcctagatattcactagaacccagtggtcacgtgttcctaatgggtggaatattattttgaatctttccatgatgagagttacattgatgggtgaaagctttttatgcaacatcatcattgttgaataaacagacgcttagcatatttaggttggaatgcaagggaactaaaggtaggggagattcttaaggaagtctactttctcttcaagaatgctatcaaattgaaaggtaattcctaaasaagagtcatttgtaaattagggaggaagagctaaaaaagattcctagcaagaaacatcataaaggggcttgataaagccaaaaaactaaaagaaaaaaaaaaaggaattagaaacagagaaaagaggcttcgtgttgtttgtaaatttgtgaataaatctgttaaagaaatattggattcatattcaacttggaaaacagggaaaggccttttattgcatgctttgaagtttgaatacactttcagtagctcttcgttatctcaaattaaatcttaaattgagcttgtggttctgtgaattaatactccrgcctttcagccctgctgctgaggtcattcaaatctaatggtggaaacggtcacagggtcaggccttggatggtgctgtatagaaatgccttaatgatgctggcagatgtttgcattctgcagctggggcggctggcgggttgggggctgcaggaagagaggagttgatgatcacattattgtgtcagccgcctgtgtgaataaggaaggacagactcccaccccatcccatcattccaggttcaataagaggyaggtgcttcctaaagcagaaaaatgtaagggaagtcatcatcgcttatcatcacctgaatgttcaccatggtgacccacatctcaggatgctgcaaaacgagagaggtcacctgtctgtgtaatcgcatatagcattctaaagatgttccattcattcagcaaatgtttaataaaggcttcatctgaagtttaatggacattgtttgataaaacagacccagtcactggtgtcagggagtttatataaaagtatacacgtatctgtgcaaatgtgtgcatttaaggcccgccgagcctgagctgatatgcatgtcttaactttgctgtttctctaaggggatggaaggattggctaccctgagctttctagacttgttattttttttttttttaagacagaatcttgttctgtctccgagctagagtacaatggtatgatcatagctcactacaacctccaatgcctgggtttaagtgatcctgccacctcagcctcccaagtagctaggactrcaggcgagagccaccatactgggctaatttttgttttttattgagatggggtcttcctatgttgcccagcctggtctcaaacttctggcctcaaagcaatcctcctgccttgatagacgtgttcattgtaggtttctagcctctgaatccaaattttatttttctagtactttattttattttactttttattgattgaaaccttgaaataaagtttttaaaaatctatttgattttaaacgatctttagaaatatatgaaggttaaaaataactctcattttgctttttataaacagtccactcctacatgtagacacatttagatgcttcattttgcctgtagaaagtttttctaacaataaactgaccaatgatgatgaaatttttattgactcaaatgtgtgattggttgatttactgtattcagtccaagctcctcccaaaggttagctcattgactctacaactctgttttcctcattcattcattcctctaatcaatatgtattgctcacttggtacatgtcagatactttcctaggtgctggggagaaacaagcaaagtacttcagggcctgtattagtttgtttttcacgctgctgataaagacacacccgagactgggaagaaaaagaggtttaattggacttacagttcygcacggctggggaggcctcagaatcatggcaggaggtgaaaggcacttcttacacggcagcggcaagagaaaatgaggaagaagcgaacgtgagaacccctggtaaacccatcagatcttgtgacacttattcactatcacgaggatagcgcaggaaagaccggcccacrtgattgagttacctcgccctgggtccctcccacaacatgtgggaattctgggagatayaattcaagttgagatttgggtggagacacacccaaagcatatcagggtcctaggcaactttgtgtgagaacagaacagagaggaagcgacacacctttcctttgggagcaatttttgggttgcttttgtttttatttgttgttttcattcctggtagtaatagtaacagtagaaaatggcagcgttatagcyataaacaaagtgctctgtggtttctctctcaccatcccctaaaccctacaaggctaggggaaaatggtaatactcatgaacaactccacttcataaatgaggatgccggcactcggggaggtcaagtgagtttcataaggtcatagagcaaccaagtggcagggctgactcccacccaggtgtgttccatgggcagcgtcttcttactgcactgtcctgacttgctctagtgagatmtaagagaggcacaatctgctttccttttgatggtgtgcagcagcatgatggccgcgcgaatttccaagaagaggatgttggtcgctgatggcatcttcaaagcygaacggaatcagtttcttactccggagctggctaaagacgcttctctgaagctcaggttcaagttacacccatcacgacagtaacaaatatcttagccaacagaacaaaaaatgttcctggtgagaacagccagggattctggaattgactgctgtagttcagaagagatttggcttcccacagggcattgtagagctttatgctgaaaaggtggccccagaggtctgtgtgccattgcccaggtcgagtctgcagtacaaactcctaggagggcttactgtgcggagggcctgcgatggtgggctgtggttcatcatgaataggggggccataggctgccaagctgtggtttctrggagactctgaggacagagggtcaaatccatgagtttgtggatggcctgatgatccccagcggagaccaygttaactagtacattgatgctgttgtgtgccatgtgctgctcagatagggttttctgggcatcaaggtgaaggtcatgctgccctgggaccccgctggtaagactggccctaagaagcctctgcctgaccacgtgagcatcatggaacccaaagatgaggtagtgcccaccactcccatctcagaacagaagggtgggaagccagagccacctgctatgccccagccagtccccatagcataacgggctgtccttggcagttgtattcggagtctggatgttgctttgtaaagacatttaataaaatattgtacaaagacaaccgggaatgcctgtaatcccagcactgtgggagtcaagacaggccgatcacttgaggtcaagagttcaagaccagtctggccaacatggtgaaaccctgtctctactaaaaatacaaagattagcctggcgtgccctgtaatcacagctacttgggaggctgaggcaggtgaatcgcttgaacccgggaggtggaggttgcagtgagccaagatcgtgccattgcactccagcctgggcaaaaagagtaaaactcagtctcaaaacaacagcaacagaaatgtattctctcacagttctggaggccagacattcagaatcaaggcagggctatacttactttggaggctctagctaagaatctgttccttgcatctttcgtttctggtggctgctcgtgattgtgggctgtgaccatatcactccaatccctgcctctgcagccacatggccttctcctcttctcctgtgttcctttcctgtctgcctcaaatctccctctacctttctgctatgaagacacttgtttttggatttagggtcttcctggctgatctcatgtcaagatccgtaacttaattacatctgcaaagacctgattcccaataagcttgccttcacaagttgcagggatttggatatggaactgcctttttggaggccaccattcaacccacaataagagcacagtggtgaggtttgaggggtggtatgaggtcacagtcacagccacccctctcaccagctgtgtgacaattctggatttccttagctgtcctctgcctccatctccctttcyctgtaagtggaagtggtattcattgatcacacactacatgccggacaccaagctattacattttttgaatatgtttcttcyttgcctcttgaggactaaccagccgggtttagattatttcctccccgtgtcgctttcctgcccccacatgttawagatggtgcaagggaaccagagagctttgatccctggtttctctggtcacaaacctgctctcctctccagaactccaggctgcctttctgtgggggctaaatcaaatttagctgttcccccaactgcaaagtacataggcatcaagtgaaagggtaaatgcatgaaaacctgaatggctgatcctctaagacagtgagagcagatgttaattgctcactgtccaagtgctgggctctgtgataagagcttcacgcagatgacatcaaagcaccatgtgtgggggaagcacgatgatcttgaccattttacagatgaggaaggtaaggctcggtgtcatcaactcacagaggaagtggagctggagtctctgtggctccagggtcaggtgtgtagtctcgaaggctgttttctgttctgcaagtttctccttaacacatttccarccccattttctggcagggagaccccaggactgaaaggagctggaagagtgaggtctaagagaaaaaggggctgggtgtggtagctcatgcctgtaatcccagcactttgggaggccaaggtgggtgggtcacctgaggtcaggacttcgagaccagcctggccaacatggtgaaaccscatctctactaaaaataaaaawaaaaaaaaaattagccaggcatggtggtgcatgtctgttatcccagctacttgggaggctaaggcaggagaatcacttgaayctgggaggcagcggttgcagtgagccgagatggcgccactgcactctagcctgggcggcaagcaagacaccatttcagagaaaaacaacaacaacaaaacatatggccagcagccagtgttgttatytcaggatgggaaccaggcactgcacctcctcattaggagtcagagtaagggggctaagctggttgacatgactggggacagagttgctgttgaaattgtcaggttatgaagggaaattagctgctgggtgtcaagaggtgcacattgctgcaggcattggcaactgggagccctggtgtgtctattagctcctcaggctgtgaggccttaatgacacccctgccaacattacaggaggcagcaagtgacagtaggaatgagagaggccagctaatctaatctgtacgccccacaggagttgggggctgaggacttcaagacctggcttctgctccctgtcacagtggcaaagacaatgacaataaaagcacagcctccagagagaagagccttcgatggacctgggtgttaaaccaggggccaggcaaaaactgggggatgcagaataggaggttgggctggaggtgagtgagaagaacggatacggttaggaccaacatttaggcaatatgaccgtgtacaggattctaccaccatcgtcaccatcagtgttactgttccctgccatctgcctatggggtgtctaccatctaaagttcagcactgcactgggcatttttaaattatcattagtatataattatatataataataatttaatttataactatatcatttattaaggtcctactatataccaaattctatyggacacatgtcctaataataaacgtgatatmatctatcattatttacaaaacttcacactctgacctttattaattatgtgtgtgccaattatgtgcagggaactgtattaatcgtagttagcaatatcgtctctagtcctccaaccctataaagtgggcacaattattatttctctattgcaattgccatttagcctcagctggattggaaactatgtaatggagactctcaggccactgtcttttgagcagcattttctgcattgcattcttgtatgtaatcctaaaatgtagatgtagttttcccccttttagagataaggtaatcaaaacttatagaggttaaagggacttgccaaagcgacacagccatgaatggcaaagctaggatttaaacccttggacttcttctccttgccattccaccccatcataaattctaaacatcataagcagaaccatcataagtcagggtccatctggaagatggatggatggatggatggatggatggatggatggagagagagagagacagataggcagacagatagctagacagatggacagatagagatttttaggaactggcgaattggctcacacaattatggaagcccagaagtcccaagaagtgtagccagcaatctggagatccagaagggcccatggtagaaacctcatccaaaggcagaagacaagcatcccaggttgaagacagtcaggcaaagagagaaaattatttcttactcagacttttgttttattcgggccttcaacagattagatgagatccacccctacagggcagggcaatcagttttactcagtctactgattcaaaggttagtctcatgtagaatcaccctcacagacacacactcagaaataatggttagtcagatatctgggcactgtgtggcccagtcaagttgacacctacaattttttttttgccttctttttatttttggtgttgtcatcctgtgtccaaggcacatatagtcaatcatcacacctttcccttagcctgtactaggttctgtgccaaggattttagaaagtcatgtctcattcagttcccctaacaggtctaggagtcattatcytccccaacctaaggaaactgagacccagagrttcagagtatcccaagatcctacaggaattgcagattgtagccaaaattggaactcctaattccagagctcctccctcctgctagcatttttctttgagtagttttattaatgagaaaagctgttgagcaccagagcaaccccgcctcttctaaataccatctgacatatacattcagcagaggaaaaatgatgtgaggtctggggcttgctttaaaatactttggggccagacacagtggctcacacctgtaagcccagtgctttgggagtctgaagtggtaggatcactagaggtcaggagttcaagaccagcctgggtaacatagtaacatagggagaccctcatctctataaaaaatttacatgaaaaaaaataaacaaaatacttctgcaacagcagcagcaagagctgccgcaatgaaagaagaaagaaaaggagggacaggatgaaggaaagaagcagtrttaacattctagtaatatttgcatctgaatgatatttatatggggttattgtcctccctttgtgtatgtttaaaattttcataataagcatatttatatatatatacacataaaacatatatgtacatattatcataatgcctacctgctcttgagaaagtagtgccgtatggctgggggtttckctcactggtttctatggctctcccctcccccactttttctaagaagtggtagtacctatctgactattttcttggctgcctgaagaggcctcaaaattagagtaaacaaattacccattaccagggaagcctccttcctcccagcagattcccagcatcttctttcacctctaggagatattttccaaggtcactaaattaagccttcagacaatcgaaaaattgaatctcagtacctctattttcctaacaaaatttctgcagcaccgattggggctgacaggtacggccgtgcagctttctgggctgttcaggtcgatttggccaagcaggacggcatcagcttgtattggagggaacatctgagcagctcagggccccctgggagtcagagcgttccctccctccttgccactgtaaatgactatttctgtcgtttgcagagtgtccttttctttctcctacagccccatccttaccctctatagccatcaggtcaggtgcgtcttcttcatttatttatcaaaagggccatagcaatcattgcaaacatgtttaggaggatttggaaaccatgttcttttaaagggcactaatgatgcagcagtaatcacagtgctagtggaaggggagggcagaatgtgatgttttgggagtgaattctgtaagagaagaagggactgcgttcctagccctccagagcttgcagctatcacagcctggctggtggaggggcttgcagagctgagaaccactcagaatttgggggctgaagaccctggctgtctgagcaccatctctgtgactttcgaggtcatgttttccctccagccctcatttccccctttataagctgtgtcttagctagtgctttcagcaaagaatatctttaggctcctggaggattgatatcccctgaagtagcccctgaccagcctccaagatgtatcctaaaagctcctatggaagtttacatttcactcaaaatatctgtgttcatgtaaatgtaaaaatgatgtcttaagatgcttagcagtgaataaaatgggtgctctagggagatgcagtgagtttatcctgtggctttgagtatacactggtaccctacgtgggagaccccggtgcccatgcccgggtgcacaaagccagcatcagtgacctgcacaccaggaggcaggctgcatgatgattgggtgcaagtccttaggtgggtcactcagtctttcttttcttgagttttttcatctgtgaaagagtgatcataatactatttccattgagaagaagaaataatttatgtaaagcacaaagcataatccctggtattcaataagtactcagtaaatactagtgaaaataatgattataactatgacctccagaagcttttrctgagcatctatctgtagcactgcatgtcaagccaagctagagtacagtctcttaggagacayaggggaggaaaacatccttggcaggttcgcatattggtgatctcgtcgtaattttctcaaatacccttcctctttcctcacttttggtgataactacctgtgttgctcttgtcacttttgcctggatccactaactcaccacctaggtatctgcaacagttatccattgctgcctaacaaattaccccaaaatgtaagcacttagaatctcattgtctttgtgggtcaggaattagggagtggcttagctgggtgattctagctcagggtcttttctgaagttgccagcaagctgttggctggggctgcagtctcagaatccttgactgaaggggaggtttcgtgtccaaggggctcactgatgtggcttttagcaggaggcctcagttcttcaccatgggggcctctctgtacagcttcaggagcagcctcacaatatgtcatctggtctcccacagagtgatgatctcagagagagtgtgaggaagatgtggcatggccttttaagccccattcttagacatcatgcactgtcaagcaccgtaactttagctacattctattgattagaagaatactagtaaagaccatagttaggagaggggaacctggctccaccattgsaagggaggtctatcaaagaacttgtgggcatattctaagaccaccacactctgccactccacacaccctgactctcctaacacctgctcgcttcactggttcggctattggcagtggcatggagtgtgggaaaatgcgtccctctctccttcctggattagaaaagtcatcatcctgctagtgtgaatccatgtcctgtggtggccctctcaggagggattgtgattaaagaatggacaacccaagggaatcatgtgtcatggtggagcatacaggccagcaggtgagttggggaggcgcctttacagaggaaaccttgagcttcttctgtgatattcattacagaacttcccccaaagacagatgacatccatttataattatttcaccagtgacttttgagctcatgcagttctatttatttttctctctgaaagtaagaaactttctttaaaggatttctgccatttggacaatgtgctatgtccccattggtgttaatcagttggtgggatatagaaaagcaaagtggccaggctcagccttttctctcgatctttttttttttttttttcctttcttaagaaagggtcttgctcttttgcccaggctgcagtgcagtggtacaatcagagatcmctgcagcctccaactcctaggctcaagcgatcctccagcctctgcctgccaagtatctgggactacaagcatgcactcctgtgcttggttaattttgactatttttttgtagagatggggcttgcttgcttttttctccagtctggtcttgaactcctggcttcaagcagtcctctcacctcattctctcaaagcactgggatgacaagctctttctttataccagtcctcaacttgcactctttcctgcatacagcttgtttctctaatgtggctgttctcatgtttacttaatggcccagccatctcctcctcctcctcctcctcctyctcctgctttctattctccttcctcatcattgtcctcttctgcgagttcagaaaattgggttacaatacctacaacgtgcagtgaggacactcttttatcataaccccagtaggcttatggtgcttgtatctgatttttcatagtctttcgcttgttaatttactgcacatatgttcctttctcttgtgcattactgatgtgtttaagaatcttgaatatctatatggtgcttagagatttcacagcagttgattgaatgctgttacctcagcatcctctgtgaaactgggtatgactacacccattttgctgatgaggaaactgaggcataagaggatccgataaattacccagagtcacacagctcacaagcaagtgcaggcttccagccaaggtttgctggctcatgcgtttcatgccttctctatggtaccatacaggcactttgtctcccagtggaatataagttctttgaggccaaggactgtgtcttaytctgtgttgcatccctttggcttcagcctcattgtcttgagtttattaagcatttggaacatttcagctgaatgastgaatgagtgaatgagtgaagccatcagtcaaatcagaacactgctcacacatgcatcccaagtccagctgtcgaacgtctggaactgagcagtatggagcctgttaagaccagtgatgctgtggcctgaataacaacaggataggaacattcccttcttctcataaatcttgtaaatttgcattgtttgtgcygaacagggcccgtgtgttctgatagcaaacatggagaggcccaaaaggctgatctgggaccatgtccccattgaacactgctctgtgctgagtctgcagaatatttaaataaggggttaatttataaagtgagctacgggaaagtttccaggattgtcrtgcgtgtgtctcataaatcggcacaaattgaatctaggtttctaggtttctgtgcccctcagctcctaagtaaaccaaaatttattgagaggtgtataggttgccatccaaagaaacatagtaagtgagaaaagtgtatcctcaggaggtctgtaaacaaggtctgaaggctggcagaaaggaccagggtctgcaatgtagaatccccattgccgatgatcagaaagtacagcgtagtttgttgcagatgaagacagggttccaggaattcttgatctttcttgaacattccactgacttcttaacagaataaagattttgtatattgcagagataatttatagatacaggtacaaaggggatacagacaaagagaaaggctaacttcaggatgttgcgtatgtcaaatcattacattagtttacccagaaccaaaaaaattatgcaatatataaatatgaagctttagtttttcatgattgttcgtaatgacattattatgataatgactgtttgtaataatcatgcgtaccaccttagtctgagcaatcatattagcagttcgtaattattgaagggctgtcaggaaccagacactgtgctgagtgttctacaaactgtatttccagtcttcttttttgttcaatttccactcaaatttttaaaggggtttggagggcgttagtgtgcccattttacagaggtggaggaggaagctccaaaaatgaagcccaaggatcttaaggtaatatatgggcttgaatccagtgtatcttgctccgamagccttgcttttgtcattatccaacattagctgtctttattatagtggccttcttaccacctacaaaacaagtgccagcattctagtaaaatttattcaccttccgagattatttactattttagtctgtagcttttatccctttaactacaccattcaaagcgttgtgcaaaatattctagtagtaaatagaggctttaaatccacacgttgataatggtcaaatcctcttaaaggggccagcaacaaaaatgactttaaaggggaaatattccttcaatgttacaagcgcccatgagcatgttagtagagcagttgtgtgttgaagaaagagaaggtggagtgatactgaataccccgtaaaatcacacaatcagcacttaagaatgttcacacagttgttcacaaacatattgatatcagaccttatagcagtcctattggctagatcagttattatgaatgtgttttatagagtaggaaacagagatgcgacgtgacttgcctaagaacacacagcagttctgaaactcaccctgtgctaatctgacctcgtgaagaaattgagcaaactaggctccagggagaaacgaaaacaayaacaacaaaaaatgtattgccaaaaaattgctagcagacatctagaaaaatgtcttcaacttcttttggtaggaaaagaggaaaaattcaaatctgaattyaacatatttatttttttgtttctgactttttacgtaaacagagctctgagttgtatcctcagatatatttgagactaacaacaaggaaatataaaattatgttactacctaagctgccacttcttcaaagcctcgttattcttgttcccttcaatgtatttcaactccaaaatacatagtgacatgaaaattgtgtattcacattgttctattgatttcgttgagaaagtgaccttgtatgcacacatgagaatttagagatctatatatacygcctggcctcttctttgtaagggtataacagcagtggttaacatgcattttttttttttaacagttagatttactcttcctttgcacagactaatagcacactgaggtaggatccagggacggctccttggcaagttgtactgctgtggcctrgggagggacaactggcagggccacacaaggaggtaaaaccttatgctccatttgcaaagcyagtggccccagcagagataggaggccctctctgtgatttcggcagtggtttccctgggattgaggtctcctgaaacttattcccgcaaggacatactactgtggacccacctgaagggtggcatccactcttctagtaggatctcacattggtattttcasacacttctgccccttgccatgtttagtaagtcatctatgttgtttgggaggaaagagaatgagcattcctcagttcctgcactgcaccaggccttgccaatacagtacctcatttaattmttgctaccatccttgaggtggctggcattaggccatttgcggggtgtagaaaatgacatgcagaaatactgtagcagctcacttaatatcaggcagatggtaagtggcagagatgaggctggaccccaggatttctgacctaatttctgatctctttaattattctatacaccaaaagcccctgtggtttggattcctaatcacgggactgagatgaaacagaatctcttagcatagggggccaagcagtagatgggcttttgcgaagaagttttttcttttttcagagtcagaggttggcagcaaaatatgagagatggaaggtcaagtgcagcagaagagagaaacagggagagtggaggttgttctctagaacatagaagccgcttcttcatcccacacaatggaaaccagagcccagattatattaacgagaagttccagaattgcagatggccctttgctgcttagggaggggggagaagaagaaggagaaaaagaagaaaaagaaaaagagcaggtggaaacttaaaaaaatgtttagctgcatgtagatggcttttattataactgctaggctgaaccagaagacttgagctatgtaaaaatgtcacttgctcttatcacggttcatagagattacctttcaacgcgagtttcattttcatttcttccaacacttagagaagtgaacgaggcagtgactcctttattccctaaccctcacccagcaacttgctttttcctctgtgttttgtgtcattctgtgtgatattgcatcaaggcaattcacggcagtggttgaaccaaaagcaatttaagtcaaaaatggacaaatatggatgtcacttataaggcttgttcaaaggcctttgacatcactcaaagcctgaacacttctcaggagtgggatacttttttttattattattttttattttctagcagtgcaagattgaagatttaatacagacctcttaggcgtctgcgtggttcttacctagaaactgtttattggtgaaccaaatattttgtatcttataccaagaaagaggggctgacaaagattgagtgattagaaatycaagtgaatttctatttattattttgacttggtaatttgtaataacaatagccaccatctatctatacttcctagatttgggcatggtgttaggagtcttatatttattattttacttaattttcatagtcatcctgtgtagaaatatcaataaatataaaggtaagtattattgtccccattttacagatgagaaaatggagtcccagggacctacctgctcaagggcasagaaagcttgaatgagtaaatttactttgtgttgttccaaaggtttctccaaaggtctttgcacctcccaaggctattctcattttgagaaagactggcacagttagaggccaggaacccatcttggctgtgtgccttctgctttgtctctggggttgtggggaaggctggtagcttgagagcctcctccttcaactctgtcaggctgcatgcacattggaaggtagcttttcaggttgtggtgggtggtggtgaagcagagggatgcaaagcagggtacgtggagggctgtgccttggtcattcccaggaagcaaagcgagcgtcaaaaaaagacagggtagttgggccatggcgttgcagagtgacagtgaaccaggaaccagaagagctgacttcagaggaggctttaggcgctcctgcatgttgattcttagagaactaaagacacagttgcatcttaaaatgttgagacttacacgtatacacaataagaatattttctttggctgcaaatgtactataaaagagtgaaaaagccaatcccaaaagattacattggtaggattccatttacataatgttcttgaaattagaaaattataaaaatagaaaacagatggctgggcacggtggctcactcctgtaatcccagcactttgggaggccaaggcagatgggtcacctgaggtctggagttccagaccagcctgaccaatatwgtgaaaccccatctctactaaaaatacaaaaagttagccgggcgtggtagcacacacctgtaatcccagcaactcgggaggctgagacaggagaattgcttgaacccgggagtcagaggttgcagtgagcccagatcgtgcccctgtactccagcctgggcaacagagtggtactccatctcaaaagagaagaaaagagaagaaaaggaaagacaacagataagtgattgccagggactggagaggagtggggggtgagtgggaaccagagtggatwtaaaacagcaactggaggatcctgrtatagatggaaatgttctgcatcttgactgtctcaatgtcaatttcctggttgtgaaatcgtactagagttttgtgagatatcacctatgggggaaactggatcaagggtgcatgagattgctgtattatttcttgactgcatgtgaatctacacttatctcaaaaataaaaactttcattaaaatcaaataactgcttaatattttgggggaaaaattcaacaagtaaattcaaatcacccacgagcccaccacccagagagagtcacctgctctattttgatatattttctcttcctcccttccagtctctctcttctgttcctagatataaaatggagaggttttaaaatgtaattacatctaactatcccctggcttggtaatatccaaccttttcatgtcctcagagaggtccaaaggctttgctgaaacttgttggtttggcattgattttgacaaaagacagcaacaagatcccctttctaggaacccatgtggattactatggattcagaatggatgcattttatgtacagggctgtgactttttctttccccttcctcatgctaataggtgttaatactttgcaataaatattacttatgtctatgaaatgaactgcatcccagcctgtcagcacatatttattttctcattttagtttctccaggttctcactgttatggagggtggggagggggtagaataaggttaggctggagggcatatctgatttggaaaatacatccctggtgatgttcctaccaagtcacaggcttggttggtgatgctaaattgggactgaggaatgggttaggagaaggcttgaagaacccacctcctaaaaccgtctcatcatcgtctagagatatttctccaagtgcttttgtttccagtgacctcccaaccccaggaactagcgaagccttcaggcaggtaagcgcacaaatcctgcattttctagttaaccatatattattagctagtgacttgagcaagttgcttcattttcctgatcctccattcccttttctgagccacagtttcttcgtctttgagtagagttaacaaattactgggtgtttgaaagatcaaatgagttagcacatgagaacatgctttgcacaaacaaagttgtatgcaaaataagttatcattatggcatgggagaaactgtttgtggacattgcctcccagttgaccctcagtgtgtacttgtggaataattttttaatataaaataattaccatcactaatcctaactgtgcacattcttgactctgtgacactgagcaaaatcctgaacctctctrtgccttgatttctttcacgtcttgttctagttttgaagagcgattcttgtgtgaattcagggagaggaggcatgaggcatggtaaggccaccgtacgtctgtggttgacaaattcagtaggcccacagtcaatgcaaaagtcctcttgcctctgcagcacagttacaatgaagaggagcgatggcatggcatgatcccactacttagggaggctaattatgtagtgtctacagagccagtggtttattttgcattgtttatgtcagcattaagcagtattcttacacagtttgtaagtcttaaaactcagtatckactctagtagttgctccaaatgtgatgtcstcataaatcaccgagggatcttgttaaatttggaytctgattcagtaggtctaggtggggcccgagcttctttgtttccttttcttatttaatttttgtgggtacctagtaggtgtgtatgtacatatatatgtatatatatatgtggttttttcaaaaaaattgtgggcacttagtaggtatatatttttgtggtctgtgtttcttataaattggtgatcccccaggggatgcctgccttgttggtccaggtaacacacttggagtagcaaacatctagacgtagttctcaatagtaggactattgccagtggagggggcattttggaaatttggaaaggcattttggtggcctttggcacttagcaggtggggtccacgggtccatcctgtgatgccataggcagtccaatataasaaagaactgccctcgtcccggtaacatacacctgtgcccccagacattcatttcggtaaaaaacttgtttccattgatctgaccccagaattccctgtgcttatacagatacacaacgtgcactgggtcttccagaaatgcaggggccttctamatcaagggaagattgtgtggtgttttgttccagtcttttaccaaggtctcaataccatcttgaaacatcatgcagcactgctcataatatttgagtcaccataatgtgatctgtctacatatgtagctgtttgtattcatggtgattaaatagttgggtgctagacatgcccttagcgagcagctcatgagagcagattttgccwgtttcttccaaaatctggattcagtgacatcgtgttggtagcttgaaactgaccgtggtgagaatatttacaccatggaaaktggcaaatgctactaataaggatgattgttttagttttcattttgtaattttcagagttggtttaccaatatgatgtctgtattaaaatatatgtaatgctgctttcaaaatgttaagtattatgagaatacattaacaaaactctggygaattttttgtcttatgtttcttgaatccaaacctataagtaggtgcaaacattagacgatttcattttgggcttctgatacactcctgtccgagaagttacctttgaaaatgtgtactattttattgtcaattatgttttctttaaaaaaaatttatgacakattacttttgctaattatgtgtgtgggtagattatgttattcatgaattttatttcaggaccttggtaaggggttayacaatatttcttttgaaacgagggtctcgattattgggcttgagtatcctgatctaattaatgcactggrcagagctggcagacgtgtgggacacccagctattctctggaagggaagggggatataagagacacactataaaggtgaatggtaatcggcatctccccttcaaggggaccaggaggatctgagctgactgggtgcctttgtggaagtgtgttttgaactgagattagagagatcagcaatgtatctcttaaagtaatccaggaggagttcattttcaaccgattcagcagtggaacacttgaagaggaggaagtcaaaattcaaaatgggttgggtgcagtggctctctcctgtaatctcagcscttttagaagctgaggcaggaggattgcttgaggccaagaatttgagaccagtctgggcaacataggcagaccccatctctaaaaaaaaaaaaaaaaaaattaaattagctgggcttggtggtgcayacctgtaggctgagctgctcgggaggccaagatgggagaattgcttgaggctggatgtgtgtggctatggtgagctaggatcacgctactttacttcaacctgggtgaaaaagtgacaccctgtttcaaaaaagaaaaagaaaacaaaaagttggaaatgagtgggaaaggatctaagatgattggaaacagtgtacatagaatacaagaggagttgggcatgctggctcatgcctgtaatcccagcactttgggaggtcaaggyggatggattgctggagctcaggagtttgagaacatccagggaaacatagtgtgaccccatttctacaagaagtaaaaaaaatcawctcacacctgtagccgcagctactcaggaggctgaggcagtagattcatttgagcccaggaggcggaggttgcagtcaaccaagatyacgccactgcacaccagccgggggtgacagagtgagaccctatctcaaataaaaataaaaatagaatacaaggggggataaagatagacttaaaatacgctctctagaaaaaagtaagaaatatggaaakaaatctaatttagaaaaatgcacgcacccacagrcacgcttcacaggactggcaggtggagaggatgtttgttaacagggctggctattttactttaagtgctgcaaacattgcactaatgtttgggtctttgcttttggcaatcacttctcttgttaatttttttttggcaccatagaaatgtttccataaatagtgcattcaatggagtgtgttactttattactgtcagccactgtcctaggagaggaaaattcaataaacacaaaagcaaagattagaacgttgaaagcttccaattccagatccttcatgagcttgtacctctaaagaatgcgatttttctatttctccacctgcaaaattcttactttttgggctggtaaagccacctaggtcagtgccatgtccaacccaatctggaaaacgattattgtggtgcctgttttgttgacttaacaaagccartcgcccattcctatgctgctaagatgcgaatgcccagctcaggggatgagattactgtcagctttgcctaagctttgggcattagcaccctccatatgcaacaaacccacaaatgaaatgttttgactctttgacacagaatggttggaaatcacttccttggccagagcaggggtccggtgtaaaggaggaaataaaaataaaaaagcataaatgaatgaggaagtgagcaaatcacactcatcgaggagcaaaataattcattccctctccgtggctcagcatggatgcaaataatgtatcattaagtaagtccccaaaacaaagacagccagcataactgttgcatcaaatatttagccagagccaaaagcaatttattatgttttttaaaataagtttgatttactaaccttcagcacaatccctatttttagaggttggctcatatttttaatttgttttctctgaagcgctgcatccttggtagcgtttcagctgtccactcggttcctaatggcagagcaacaccgaaaagcgtaattacatttcctaattatgtgtaattaggcaaaacccagatgatgtattcaacatgctctgagaatagccaggggttaaagactgctggaatttggtaacatttttataaataagctggtgcgttatttaacgtggaggtctaaggtgacgctgggtgccttgtagaccgatactgtggttgaaatctatcgtatttgtttatttagccaagtaaaactgtaagtgattccccacctccataccttcccctcttttggaaaccagagtttagttgtgctattcttagcccaagagaggccctctaaacccagaaccataaagttctgcttactgacagcctaagtgatatttattttttcaaagcttaatccttttgaaacatggagaaataaatacatcctcttatctaccatatgcctgggatgggaaataaattcttattttcctgccgtgtggtaccagtgggttacgatgaataatttgggcagtctcactgaagataatagggaagccttctctattaccagtgataattatgaatctcataatggaaaacatcccgagcccgaacatcaatcagggaagataaacaatgggaaatgataggtgtacaaaagggaaaatggcaacagcacatgtggagggaaagaccgcagaattctggcrgggttataaatcatacagtcaaataatttccgtgcaattaatatcctcaaattaaaacatacgtttttaaagaaagattttgcagacttttaagctgggcaactgtctgccttacaagatgcgtctggaaaccccagygccatcctccttttttagtcttgtatatttatgtatccccggccagagttggctggggcacagtctaacagtgtcaccgtgtaagctgacccagtgaccttgctctagctcaccagggactgagcatacaccaaagtggccagagctagtggttgctgactctcaggatctttggccctgacagaacaacaaagactggcctattgaggcaggaagtcttaacttccttggccagcctgaaaggctgtctccaaccatgcggacacagcgcagtgaagcggttggaaaagctacagacaaatggaaaaccttcattccaaagggtcgttgtctcctcytatttaatagccctgcattcatgcacttttttttatcttgctgtctttttttttttttttaatcaaataccaaagtacttctatggactggtcttaaaaaaaaaaaagaatccattcataactgtgaaaaaatactgcctattagtctgctattgtggctcaaaatgaaacttaagactacatggctaatttatttactgcatcatgggtgaagaccaacaaggtttccagcctttcctcctatctgtctgcatgtagaaattcacagaccacggccattctgacatgaatatcaaatgagaagttttccattccaaaccctttttaggagcggcctggaaactggagtcaactgtcaaatatgtccttatggccacaaagtatgctcatggattctcttttacaggcttagcataatattttataaaacatatttttaaagaaagtgtaattttcccccaaaagcaagggttttccaatgccatataatttactaagtgtggctttgctgcgtaatagtccataatttatagtcagcctccacaaggcaaaaaataactccaagctatgattaagtaagtaatggacaaggtaactaatatttccggaagaatggccttccagacactcattttaagtgacaaaatggttgaaggttgagatatgtactaatcctgtactaatttaatggaatcaagaaatgacattataagctggcttatgtgggcacttaagacatggagctgagagtgaatatgagagtgaatattctgcacgtccattttaatgaccttgtgcctcattttccccatttaaggtagatgggtttatgyctaattgtgccaccagtttttcccataaaataattcatttggaaggggtggcctaatccagtctgaaccaattctaagatggtagcrtggatgcgggaggcactgcacaggatggaaagcatggagtttggaatctggcacaagtggatttgaattcagacttagtcatcaggagctgtgggaccttgggaaaggttggttggttggtttgttccagtttttaaattttgaaataaatgttggcttacagaaaagccataaaaaatactgcaaagatttcccatgtactcttcactcagcttcccctaatactaacatgatacatttttcagcactgagaagttaaccttgttatgatgctattaactacactcagactataactgaccaacagactttatttggatttgacggtgtgtcctcttccttcttttacaaccagataccacctggcatttattatcatatctctccagtcccctctggtctgggacagtttctcatgcattattttttttaatggccttgaaatttttgaagagttccggtcagttattttgtagaatgcccgtaatttgggtttgtctgatgtgttctcttgattagaatgacgtggtgcatttttgggaggaatatacataagtgatgtgccattcttcggccatcaagtcagaggatgtgtaatgtgaaaatatcttattactagtgatgttagccttgacctctcggttaacgtggtatctgccagatttctccactgtaaaggatcatttttttcctttgtaattaataaatatattgggggaggtactttgggactacttctcwaattttcatccattaattttagcatccctctggggatcttgcctgcaatgattaatactgtggtattctcatgactgatattgtctttctgtcatgccttctattttttggtgggaattcttctacatggaaggctgtttcttcttctccatttatattggtatggatacgtgaatatttagtttattctgtaggtcataatacgacagtattgtgatatattttggtgctcaaattgttccggstttggcccataggaggtctttcgggcaggttcctgcacccttttgacatgccccgttcttttttgagcactttcttattttttggcactgtaagaggctttacactgtcatcttggacttccctgcctcagtcttggaattaactcattctccatggaggcttggttcgttttattatagaatcatatttagaactaagatctaggtgctagttgcgctcattactgctggagtgtcattgcttctagaacttctcaacagagtttagaaatatgtgtattatacaaacccatgcacatacacctatctccatttattcctgtatctctgtgtatattataattttagtatatttatatttctttctggacacattccattatttgttcatatatttataacatatcagtatctattataaattatatatatgtacactttaatgtgtgtttgtacctaattccaatccaacacaacaactgggttttttcaaacttgtttctttgtttttttctttttgtggagagcagggtcttgctatgttgcccagctcagtctcaaagtcctgggctcaagcgattctcccgcctcagcttccctaagtgttgggattacagacttgagccactgcatctagccacaactgagttcattattctgagctttctttgggatgttatttaactctcagtttcttcttctataagatggaaataataacaactaaaggctaggatttggggaaggtatggtaaattgtaaaaatggtagcttgtttaaaaaaaaaaagaagaagaaaaaggaaaacagtatttccctcaccgcatcaacacctgtcctgtatgactggcattgcccagtggaatcttagcagcagaggcatgacaagcggtcagatactgggactttctgtttcgttgcttacaaccctgtgaccactgcacgaacaaccctgagctgacctgctggagcatggtggccacataaagggagagtggttgccccagctgatagcctgtcggtgcctggcatatgagtgaggtccctctagagtcatctagctactagccaagctaccacctgaccccagacacaccagagaaagagcacagcccattcgcggactcagaaactaaatataagaaaaatggtcactgttgttactcactgggttttgcaggggtttaatatccagcaaatgccaatgaattagagttgacatacggaaaacaagtaagagtaactttgtacaccgtgggctcccaatcagtgctgcttttcgttgttgatgttgttgttaatgttgaaaaaaatcttcaagtcatrtttgcccccacagaccttcccagacagtctaactaaatgcactgtatttgctaactgttggaacttggcttttggactagaccagcacctcgagaaagaaccactgttaaaatgtaaggctctgagtgtttatcagctcacaccaaggaagagagagctcaggagcgactgggcatgaggtggagtgagcactgtgaatgctggggaatggaaagtcctttatstggtgttgcctaagggtacggggaacctggcctggtgttgggaggaaacagggtgcagagtgggaagggcaggagtatctaagtggccaaatttagcctaattaacagatttgcctagggctgaccctgaagcaraaagcaaagcctagatcagtctgctctcctcctaccaacagggtaatgatgaggttgaaccaccagttctcaatgccatacatgagattcccaaaatagacgggagttacacagagacctttttttttttaacctcctctgagattttttttaacctcctctgagattctgtatttccttaatgasccgaaaaatctatttagcccagtttttatccttgcagataagttagtacgcttctttttctgctggttgtgatcatatttctatttaggggtaaaggtgctgaaaatcatttgctgcgatgactcgcaaagacatagttaccatgagcagcagtaggatgggtggccaccagactgccatgggcatgatcactgttgacaatcttgccacagctccccagggtctacttggtgtcccacggaggacagtctatacagtaactcaacattaactgtgtacccctcctagtttggccactgttctgcccaaacatacaagagtcaatgtaagtctctgggagcactcacctttgggcrtgttgctacagagtcactcattcctagaaattgcgaagtcacgaagttgtcaaaaaacacaacgacaggccgggcgcggtggctcatgcctgtaatcccagcactttgggaggccgaggcgggggggatcacgaggtcgggagatcgagactatcctggctaacacggtgaaaccccatctctattaaaaatacaaaaaaaaattagccaggcctggtggcgggcgcctgtagtcccagctactggggaggctgaggcaggagaatggcgtgaacccgggaggcggagcttgcagtgagcggagatcgtgacactgcactccggcctgggtgacagagcctgaatccctctcaaaaaaaaaaaaaaaaraaagaaaacaacyacaaccacattttgagataggccttccttggcaaactttgatttcgtttctgtatttgaggacaaaacacagtatggttgtttccctccctagactagatttctaatcttgatgcagtgagcaaagggcgaggtttatattgttcttacctgagccaaaggacccataaaaaatagagtgataggctgggctgggcgtggtggctcatgcctgtaatcccagcactttgggaggccgaggtggtcagatcacctaaggttgggagttcgcgaccagcctgaccaacatgcagaaaccctgtctctacttaaaatacaaaattagccgggtgtgatggcacaggcctgtaatcccagctacttgggaggctgaggcaggagaatagcttgaacctgggagatggaggttgtggtgagccgagacaatgccattgcactccagcctgggcaacaagagcgaaattccttcttaaaaaaaaaaaatagagtgatagagtgagaatttggcttttagtctacagaagttttcactaccagtttctgtgtgtgtgagtgtgtgtgagtgtgtgtgtgtaaaataccaaagagaaaacaataaaaaaatagagaaaataataataactagccaatgtgtcatcactccagacaacagccayggtcagtatttggttaacccattcagattttcccctatgaatgagttttttcgcctccataatattagttataatacattgatactacatcccgagtgtttcacttaacattatagcacaagtgtcttcccctgttgtaacatagtgattattaatgtcaaatatcagctagataaaagctgtcaagtgatagaaagtccttatagctcataaactcttcaataactgggaatttataccgtttatagtttttttactgctaagaataatgttgcaatgaaacgtttgtatataatgctgtttagtcccctctcccccattgtttacgattccttggagttccactgctacttcatatttaccatcaccatccttgttcaccattgttgaagctttatgtaatgacgagcctcatccaggacctacttgtgtctctgtgccagtcactgcctgtgaaccaggggtgtgtggactcagggctcaattcaaaaaagaacccaatcttattgggacaaacagatattgatacccctggtctttgagccccactgtcttttcacactaatgagttcttagtgtctatttttggtgattgagtagaacttggtgccatattggctcaacatggaagatttctgtgatcacttattgatcagtcatgaataaggaatcgggatggcagtcgggagtgtgccaacacctctctcagtattctgggtctctctgcatgtagtgtttcttttgcagctcctagagataaattttttaatgtattacatgtgagttatttgaaagagggtaggtgtggacagtgaggccaggtgacttaatttccagaagcttgcctgtggtatttaccttgatgagttcattaacaatatggctttcaccctcaaacttgctcattcagaaattagactttgtgagcccactaagagtaggtctttctgttaggtacagactctacaataaccaaattcacagaaactgatgtgtaaacccagggtcataaacaataattttcaacmggagctataattatcacatagtttgaaatgctcttgttaatctgagtaggaagagaggatgagaattttcttataggtggaactacagaaaaagagtttacttataggcagaagtacgggtactgagccaagtgacattgtaagttatttaattggcaaatgattaaagcaaaggtcattgcctatatgactcaaatgcttggttgcctcagaagataatgagcctgatactttcacagtgaagctgtattgcacgtttgtgtttgtttattttccatctttcccactagacggtgagggactttatctgtctcattcaccactttgtccaacctaggacagtgtccgacacatagagatgctcaataaatcttggctgagtcaatacgtttcaaaatacaaggtgactccaaatataaaacaattttttattttcaaatgaagtggacctcccctaaattttgtgcccagtttataaactttaggggctgtagatgaactgttcaaaagttttattgtaggatttcacttgctaatgcattttcacaagtaatgtatttattttaaaagactggagtttttatatatccttacatttatgaaataatttcatttaaacccttcatgcccatcttcagcatcattgctaaagcctcttggtttctgtacctgtaatcttcattcattcctcagctgtttgaaacacagcacttttgggatccttgtataatactggccccacaatcaagagtgacttgaactgggacatgtttgtatttcttcaagatgacttttcattctctcatctcattcattttgaggtcattttgttgttgaaatgttagagttcaaccttaaatacttaagagcatggcactgtstagagaaagggagatgagcttctgtggtagccagaggtcaagatggcctctagtgaccctcacttcctgggttttacattgcagtatatttctcttctactctgaacaggattgtcctgtgtaacctacagggggaagtgrtagcgcatgacctctgaagctaggtgacaaaatacatttggacttctgctttgcttctcttggatcactccttgtggcagaagctagacaccatgttgcgaggatactcaaacagcaccatggggagatccgcatagcaaggaatcaggcttccaacagtcagaccagattgccagccaacatgagcgagccttgttggaagcagttcctccaaccccctttaaacttttggatgaccacagatgaaatgaccatcttgacttaggagacacccaagtcaaatcagctagctaagctgctcctgaattcttgacccagaaaatctatgtgagggagtaaatatttattaatttttaagatgcttcattttggagtaatttgctacacaccaatattaatacagagcccatatgcgctgcctacaggataaataatgtaatagcttaataacaattaaaatggaagaaaatgtaggagttcctcaatggttccacctgtttcttgaggttaaaaatgtacacatttgtgggcagaaacttttatacagtaataaattctttgttccctctgcatatagcactttctcaaaaagtagtttggtgacaggcttctttcttctcatcattaaatgacatactggagatcagtcagatgaacwgcaatttatatcttgcccccacccagtgttgatttgcccgrggtcatacagataattagtaatgtcttatctcagttttcttatctgcaaaatgagaatacctgatggggttagtgtgggagtttaatgtctgtaaggtgtttaatttgttgcataacaatatgttgtactatacgttataacaatatgttaatatgttgccatgtatagccatggcaaatgcatagtaaatagcaggtataattattattatttttttcttttttgttttttctgagacagtcttgatctgtcatccaggctggagtgcagtggcgtgatctcggctcactgcaacctctgtctcctgggttcaagcaattcttctgcctcagcctgctgggattacaggcgcatgccacgaagcccgactgatttttgtatttttagtagagacagggttttgccacgttaaccaggctggtattgttttcattattgtggttatcattatttatttagttattgatcatcaaaatccagaaatccagtttcagcaaacattccataacccggtgtgctaaaaccccctcactgctctccattactcatgaatcttcttgaccatgaggcagaatctttgtattttcttctcatcaaggattttatctgaaaaacctgtagtacttcgcctttccctgggtggagaagaggggcggataaatacttctaaagtaatgtagtatgcactctcctgcgtggtgggggtgtagtgggcttcctgttatgaaacccagcttgtaagcatgtatctacatcccagggaggttttcactgaaccaagagatgccataagcagtccttgttgtaataatttaatagcgaagccctcagcaatagatcttcaggtaaaatggatgctgactgtctrtctgtcatatgaagattcagacattgatgtaatttaaaatacttgtagtatcatggatacaaacatatgcctttttatttctgaaggaatttccagaatgttcgattaaaaaatgaacagaggaaatgaaaaataaaattgtctgttgtaccaccacctgaagataaccactactatcattttgctatatttctttctatatttttctcagcatttacacgattgtttttacatagtagtgactttgccgaacagttatttcatttcgcatcttgatattttttctcaattaaaataataattgtgaacattgttctttctactctaactactcaggttgcttataatgagcttgtattataataaaacttcattttattttagataaaatgaaaagatgttactatgcaggtaactttatttattatttgcatgcagtttatcaaatagaattccttggttcagcaaaatgamacctttaagtcttttagcaccaaatgtttgaaattatcatgaaacacattctaatttggcagtgagttcaggagatgaagactgtcctttagttaacatcaatagctttctaaaatatgtagccagttaatattttacttttgcctatgcatccctcaaattgtaacacccctggaacataaaaattcctctattgagattaacacctaacgatacctgtatttgctaatttgtttcttttttttctttgaagcagcatgttgctttgtcacccagactggagtgcagtggcgcgatctcagctgactgcaacctccgcctcccgggttcaagtgattctcctgcctcagcctcccaagtagttgggattacaggcacatgccaccactcccggctactttttgtatttttagtaaagatggggtttcaccacttttggccaggctggtgttgaacccccgacctcaggtgatctgccctcctcggcctcccaaagtgctgggattagaggcctgagccaccgygccagctctatttgctgatttttgaacagcagcttttttttttttttttaacaaaactttaaaatgggttatgtgttttattttcttagtgaagtaatggcttctcaaatttacactccattattttatttaaaaaaatcagtatgattcatcataaataagtcaggactatgattgacagtctacctagaaagattaggaaagtggggaccaccccccaattatwacctttgttyttacaagtgtgtttaaatctctttctgttaatttacaatttgaaaggtgggtgaggagaagagtttgaaaaatagattactgtcttcattaatacaggtttgacctacaaagtcttcacgtacttaatgattaaaaaccaaagtactaaataataaattataagaatttataggagtcatcttcttgaaattagcttactgaatgttcttatcataataaatctgagtgggtgtctaatttagtgttagctgactaaaattgtatgttgcggggaggaaaaaaaaacacttttgtttgaagacaaatgcagtgagtttaatcacaggtgatctgaaaggcaccacctatcttttgctatgttcactttgcagaaactttggcgaaactggctgaatgaagatcgattccaatttgtaaatgtggcagacaataaaatttccccaagcactttgatgatgtttgtgttaatacttcctgctcagagctgtagcccatcagattctagagctaaccaaagagggaagacaacctgtcttctcccagtttccagcctgtatagacttaatcattttcaaggtttaaggttgtttttgtttattggttggggtggagagagacgcaccacctctcctaacttctgtgtttgcttccctcatgctgtgtggatcagaaaagatagcctgttcattcatcacttatttcctgacttccaccttgggtctgtcagattctgtgtgaagcccaggggatccagggaaaattgaggcccagtccttactctcatgtaactcgaagtcttttacagaagacagacttgggaacaaatcaatcaaaatgagttttgtacggaaaaagtcggtgcacgcacaaggtacccaagaaggaggtgactaactttatctaactttacttgcagggcaaggcaaataattagggaaagtttccttcagacaggggaagacaaatatgagtatccagggaggatgtttctggcagagggatcagcataggaaaggagttcagggatgaaaagagtcagtctggtccctagaaataatttttttggtgcataaagggccagaacagaatgacagaggaaaatgataaggatttaggcagggactgcgttggaaagggccttgcaacaggcctggacgttgtttgtaggcaagtaggggcaccgaaagctttaaagcagggagtaacaggcttgtagtgacttttatcgaagtagaagttgaatagatctagcctggcacagtggcycacgcctgtaatcgcagcactttggttggctgaggcgggtggatagcttgaggtcaagagttcgagaccagcctggccaacatcacaaaacctcatttctgctaaaaatacaaaaatcagctggttgtggtggtacacycctgtaatagcagctactcaggagtctgaggcaggagaatcycttgarcccaggaggcagagattgcagtgagcccagatcatgccactgcactccagcgtgggtgacagagcaagactctgtctcagaaagaggaaagaaatggaatagatctctttcagtacaatgggaaggggcatataattcagtactttaaaaaaatgtactatcttatgaaatagaaatatacatgtacatagatttaacacacatattcacgaacatacacatttacatatacagtcatcattgcttagagaggaggttgtgttctgagaaatgcttcgttaggccattttgtcattgtgccaccatcatagagtatacctatacaatcctagatggtataacctgccatactcctaggctaggtagagcatattgctccctggcagcaaacatgtacagcatgtttctgtcctgaatactgtaggcaattttaatacaatgctaagtatttgcatwtacaaacatagaaaaggtacagttaaaatatggtattacaatcttctgggatcaccattgcatatgtggttcattgttgatcaaaatgtcattatgcagtgtgtgacagtgcttaaataatttatctcacatatgcaaagagttttggctaagggaaaagaaaaatgtgaacctcctaatagaaaaatgggcaaagataatgaacaagaaattcactgaaaagaattggcaaacatgaaaaaattctcaactttatttttaatcataaaaatggaaattgaacaatgagatactgtttttcaccatgacattggcaaaagttaagaaggcagataacttccatgttggtgagcatgtaagtataaaaaggtataaaaaagaagagttgtcctgaatctggtctggaatagaacctttttttccatgatgcatgatgtaattcacagcctcattcctgataaattgcttaagcaattttctgataaactttaatgcgattaagacttgttctgagaaatcagtcacccatctacccaagctgactgtcggtcaagagtctagtgaccttaaaccaaatgttattttccttttgtatctagcctaacattgactatcttgtcatttcattttcctataaaatgcctccaccaaggctgaatctttgaattgatcactasaggccttttccctagtagtaacattataataaaactttgactcatgctcataactcgattttccaaaaagttttcctttacaggagaaaagaacagctgctgtttataggagcatacattgtttttggttattttgaagaacaagttggcatttttgaccgaaattaaacacatgccttttgatcaagcaattccattctgtaccagaaaatacagaaatatttgaatgaatgtgccaggacacccaattagaagaatgaatgcttttttagcattattttgtgtgcatacatatttatttagttatttgacctattacattctaaattgatattaataaagaggtatttgagttacagtttttccaaagttttaaatactctatagcaaaaaaaggaaaaatgaaagaaattaaaaagatacctctatatacatacattgtgtgtttgtgtgtgtgtgtgtgtgtgtgtgtgtgtgtgtgtgtataaattggctgtgcatgatataagtttttatttcaatcgttttaggggtaaagtggtttttgattacatggagaagttctttagtggcgatttatcagatttcagtgtacccatctgagcagcatatgctgtacccaatatgtagtcatatatatatatgtgtgtgtgtgtgtgtggatgtatatatatgtgtgtgtatgtatatatatgtatgtatctgtatatgtataatggctgkmcatgatataattttgagttggaaaaagcaaattgaagaataatacatgtattatcatgtctttaaaaaaaaactatacacatagctgaatgtttttgtgtgtattttcataaaatgatttggggttgaggtgataaacattaattataaatagtggtagataacttctatcaccagcacggagtgtggcttaggagctgagaaggctttgaggagggaattttctttcttttttctttacctgtcatgtttgaattgtgttccatcaacatgtcctttttatttttttgagatagtgtcttacttcatcacccattctgtagtgcagggcacaatcacagctcactgcagcctcaaacttctaggcttaagtgattctcccatctcagcctcctcagttgctgggaccactggcatgtgtcaccacatctggctaattttttgaacttttttgtagttggggtctcaccatgttgcccaggctggtcttgaactcctgggctcaagttaccctcccacctcagcctcccaaagtgctgggattacaggtgtgagccaccacggctggccaatatctactagttttgaaattaaaaaaaaaaaaaaaaaaaaatatatatatatatatatatatatatatatgaaaaaaaggacaaacgatttcagttgcacaactataatcgatgaagtggctccttgatgttctcggggcaatctgagacactggggagaaccctccacctttgcagagaagcaggatgaaggggcctaaaatgagttcaactgatttcaactttgtttcccagcataaagcttgggctgagctgcctgaaagggaagtggagaaggcaggaatggaattgatttttcccccctgctgaattccccttctccctactcccttcctgcaatttctaataaattagaagagctctgccttccagaaaagagcagaggtaccttgcagtacttttgggaatcttaccaggaagaactgggtctactattgcaaaggaaaagctttttttacagtgttaaaaattaattaaaaatggaatgtgttatagctcgatttttatcattagcacccattccagagggcatgttgctgttagtaaaacttcagatttttcctgtcattatggatttggttttagggaaaataccttcatgttcagcattttatgtgtcagtccctaaaactcatgatcttctgtgattctcttggtttaagagcagggcgagtaatgtactcaaaaatttctccatagccttctgggttagaggatataacagctggcaaacagaacactaatagctattgatggttattttcaaaggatggacatcgatagttaagttttaaggaagaaaatgaagaggaaatttaatgtgatttaacagtgatttttttttaaagacattatttgcatctcctattttcacttacttataaacaggtggtttccaagtagacatattttttgcttgcttgaatgagaaagcataatgaactttgtgatttggtgacatatccagatagctatagcaaatagctataatgccttagataaatagcattttcacgagtaaactttttagttctcaaaagaaaaattgtaacaattttctagccgcatattagcattatgcacaaacacataaacttttggctggaattgtggaatatgaagtagctcccatccttattccatcgcccatatgctaaaatgtagattgtattagttgagaaattttaccaaatatttacttatactgtgctattatttatactatttgtcaattccactatagtagatgcttaataaatatttgtgaatcagtaaatggatggatgaatgaatagtggcctacttctgtgaaggtaattgaagaattcccacacttggccccctttggatataacgtctgttctgagcacctcccattcactatcttgatgcctcacataagacctagtatatagtaggcagtcaatgaagatcacaatgaattggctagactttgatttattcatttatgcaaattgcctgacattcaaagaaaaaagaaggaaaaaatggacctcttatcatgtgccagacattgttctaagagggaaagatactgtgaaaaagaaaagtccctatcctggtggatcttagattatcgtggagaaggtaaggcaacaaacacaaaataaatacttcatataagttcaggtaatgataatgcgtgaaaaagaagtgttcttcctgttagcagtgccaacatccgctttagtgctctgctgcactgcaaaatgtgtggatgttcttgagtatgtctgggaactagctaaaattagggagttaaaatgatccagcttagctcaggctatagggaggatttctctcccaggtgtttgttttgttttgtttttgagawagggtctcactctgtcacccaggctagagtgcagtggcctcaacctcccaggcccaggtgatcctcccacttcagccccctgagtagctgggactacaggcgcatgccgtaactcgcaactaattttttgtatttttttttgtagagatggggttttgccatgtttcctaggcttgtctcgaactcctgggctcaagcaatgtgcttgccttggcctcccaaagtgttgggattataggtgtgagccactgtgcacagcctcagaggtcctgtctgcctgcctgcctttcctccctctctctctttcttcctctctttgcttctttccttttttccttctctgttgaaggcctgaataaaataaaagactgagtaagaaagaattgactccctctgcctgacttcaagctgggacgtaagtcttctcccagtccatgcatccatccatccacctatccacctattaacttattcacactggctttaaaattatttttggctccagcttattattttaaaatgtaaaatgatttacagaagttgacagagagtataattaaatcccatgagtctaccatccagattcagtaattattacatgtggccattgttgttttatctctctccacccacttcccccatgcctgaaaatttaccaaagtaaacgcaagacattatatattgttattcatagacattttgagtaactaaaagtaaggtctctttaaaaaatgataattacagtatcatcatcacacccaaaaacatcacaaattatttaatatcatgaagtgaaggcccatttttccaatcattctctaaatattataaatgtcatctttcattagtttgtttgaattccaggtaaaaacctttaactcatttccttcttttgatttttcaaaagttggttgaatagtttctgtcttaaaaagtccagaaattgttgaaataggtaaagcacaaaagaaattaaatacaccatgtttccaggcctctaatgttttctattcaaggttgtaatatccagtgcaaggctaaaattgctttctggtgataaacatttgagaaagatttggttgttggtgatactgatggttgtagtaggagtctctggagaaattgaactaatactatatgtgtgtgtgtatctatgtatagatatagatacacacatgtatctattatatatatagagagagatatatgcatatctatacacacctacgggtgtgtctgtatctatacacacacctatgggtgtgtctatctatatctatacacacctatgggtgtgtctgtctgtatctatacacaccgatgggtgtgtctgtctgtatctttacacacctatgggtgtgtctgtctgtatctatacacacctatgggtgtgtctgtctgtacctatacacacctatgggtgtgtstttctgtatctatacacacctatgggtgtgtctttctatatctatacattatatgtactaaataatatatataaacactatagtatatagagtatacatatacacactatagtgtatgtactatacactgtgtactaatacagtgtataatgtatatatatagtattcaatatagatctataaacacacaagtgcatacacacacacatttttctgtatatatgtataaagatatatataaagatttttaaataaggaattgactcatgaaattacagagactgagacatcgaaacccaggacaaccaatggtacagttcatgtctgagtctgagcagctgagaagcaggagataaaaaggcatcagttccattccatatccaagtctgagtccaagggcaggagaagctgatgtctcagcttgaagtcaggcatagagaggcarttctttctcactcagccttttattttattcaggccttcaacagattgtatgaagccacccacaytgggaagggcagtctgctttactcatagtactaatcgaaacgttaatgtcctccagaaacgccttcatggacacactagagataatgtttaacataatatctgggtatcctgtggcccagtcaagtggacacatacaattagacatcatggtggttatgccaagttttttttttttttttttgagatggagtcttgctctgttgccagggtggagtgcagtggtgcaaccttggctcaccacaacctctgcctcccaggttcaagcgattctcctgcctcagcctcccaagtaggtgggattacaggcgccaccaccaagcctggctaatttttgtatttttaatagagatggggtttcaccatgttggccagactggtctcaaactcctgacctcaggtgatccacccgccttggcctcccaaagtgctaggattacaggcgtgagccaccactcccagccagccaagtaagttttaacttggaaacaatgagcagacactcgcagtacattctctacttagtatatttctttttcagagtcatctcaaaaatctctaggccaagtgttcttaactatggaccttgatgaatggaccctgagtatcttagaatcttctgaaataatatgcagcattatattccatttgtacctgggaagagggtacttgtctttcatcagagagtcaycaatggaccactggtcyctgctgatttagtgtcacagctcaaaaccatcagtagtcctcgtgatctttcggcattgtggctccctttgtgagaagggcctaagagtgaatctcccaaccataagmtgtattcaggcaggcacgaagtctcttatttactcagtgtttctggagcccagcatagtgcctcgcacacagcaagtgcycagtgggtatctgttgaaccggcaaaacaaacaaatgaataaattaatgggtggtcactgtactagttttctattgcttcataaacaaactatcacaggcatagtgagttggaatgatggctctcaaaaaactatgtccacatcctataaatgctrttgtacaatatatggtcttttgtgattggcctcctccacttagcrtcgtgtttttgaggttcagccacagttgtagcatgtccatctctctttgtgtggctgaatatcattgcattgtatggatataccaaatatttttctcctttcatctgttgatgggcatttgtgttgtttttaccctttgactattgcaaataaagctgctctgaacatttctgtgtaagtttttgttggaacacctatttccagttcttagggatatgtatttatatcaagccaaactacctacctaaccacctacctgggagtggaattacggggtcatacagtaaatctatggttaattcatcaggaattattttataaatttttgatgttggatatctgaagataatacagaatggagcccttttttactttacagattttttttttttttgagacagaatcttgctctgttgcccaggctggagtgcagtggtgcagtcatggttcactgcagcctcgatctcctggggctcaagccatcctcccacctcagcctcctgagtagatgggaccacaggcrcatgccaccacacccagctaagttttgtatttttttgtagaggcaaggtttctccatgttgccaaggctgatcttacactcctgggatcaggagatccgcctgccttggcctcccaaaatgctgggattataggcatgagccactgcacccagccctggatttggctttttgaaacagggctgcacataacctccatgatgtgattctggctgtgtctgttgaggtcccattgggcccagctctgagattccctgttagcacagggtctgacacatcacagatgaacaatggatctttggtaattaaaaacagagctgtgtggctatttttctccaactcctttttttttttttttttttttttttttgagacagtctcactctattgcccaggctggagtgcagtggtgtgaactcggctcactgcaacatccacctcccgggttcaagcgattctcctgcttcagccccccgagtagctgggaccacaggcgtgcaccaccacacctggctaatttttgtatttttagtagagttggggttttaccatgttggccaggctggtcttgaactcctgacctcaagtgatccacccatcttggcctcccaaagtgctgggattacaggcgtgagccaccgcgcctggctttcaaattccattttttaaagttaatgctttaatatgttaaacacccttattaacatattacatatgttaatatgtaaaataaactccgtacattttaaagtgctaaaggttgtatgtttgtgcgatggatatgtttaagagaatgatttaggatgcgatcagttttttttccttgacttactctcttcctttatttttttcccttcttcactttctctgttattccttgccaatctcataaataatgtaagacaacttgcaagacttattaaatgactgatttccttaaaagaagtacgtcaggtgaagggcagatagaggtcaacaccatagataaatctttacactccagtggactttgattcacatcatggctctttctcttccttgctgaggcttttgacaatttcaaatgctccctgaacctcagtttcctttgccacaaaatagcaatacaaatttataattccttagattgctgtgagaatgaattgaggcaaggtaggtaaagtgcaaggaattktgtgtggccggccaggtgcagtgtggctcaagcctgtaatcccagcactttgggaggctgaggtgggtggatcacctgaggtcaggagttcgacaccagcctggccaacatggtgaaaccccatctctactaaaaatacaaaaattagccatgcttggtggcaagtgcctgtaatcccagctactcaggagacggaggcaggagaatcacttgaactcggaaggcagagtttgcagtgagccagattgcaccaccgcactccagcctgggcgatgagtgaaactccgtctcaaaraataaacaagaattgtgtctggcctttgtgatagttactcaacaaatcatatctgtgattgttttgrttttaacaataatggtttttaaaaaccgtaggtgatcacatactacgcagaaagggaagcagttacagyattcacagcatccgtgagtcatagactcactgcattgctccaaggtgcagattctagttggaaatgttaagttttttagagcaatgaaaaaattgatctctttctcttccataacatagatttcccatctagctcctgggctaacttttgtttagtagttgtattatgaaaacaccgaagaatccttctgccagtctccatagcagtgatataaatcagagcccgcagtttcatgaatgcctcgctgtgccaccaggattttcttggagggagccacggtcagatttcaagtggtcatttcactctttctccctctgggggmctgagacatgattaacttgcaataattgtgactccctcattaaaggagagctgtagcaagggaagaaatcattgagactgatcaagacatcccgtgctattttttttttcttgcatatcagctgtgtgggtacctcttgttcctctgtccttcaggttagtaaaacgaagaacagttgctgaagctatgagctatcgataaaagctaatgtaccacacgaaattggaaggggaacaaaatcacttaagtgttcagggccaccaaggcactggtgcatcccctgtgagcctrtttggctcctggcggtgtttttgttgccctggcttgcaacgtagcctgattgttctaagtaaatggcagagcacgcaaatcaaggacattggcaataaaccaggaatgcactgtttccagccacgggctatccagggaattggggacagtctgtaatgtatcttgagctaggaccatatccaaattactggcctttccagtttttcttwaaatagtagggtcagtaggtgaccacactcagaagccaagcctgcagcatcagggctgaggagcaaactctttctttggtctgaagcttcaaatatgaacccttgccaccagctgcataaatatgatagccaaagggtttcaaatttgtgatttgtcataaacgctcctattgcaggctgrgtctagtccttcttgactttgtggaaggagaaggcttgaggaagtattcacaattggagaagggcgccttctgttatgttcttagctcactaaaagtggttaatgatgagaaggggtgggtcaatgacaagaaaagtggagaagatgagacagacaaaactgcaactcatcttcatggcacactggtgagtgggggagtgcaagaagtttaggtgcaaaggaaaatggagtgaacatcttggcttggttaacagaagaaaagaataccaacgccgtctattttcatatccctttctattttatgtacatatttatcaatatactttttgttccagaaataaatgggaacttaggcacaatcttttacacatcttacctcaactggtgactcttcataatctagagctattatagtttccaattgacagatggggaatctgagactcagagaagttaaatgattttgtgtgtgtgtgtgtgtgtgtgtgtatgtgtgtgtgttttgtttttttgtgtgtgtgtttttgtttttttttaagacggagctttgctctttcacccaggctggagtgccttggtgcaatctcagttcactgcaactacaacatcccaggttcaagagagtctcccacctcagcctcacgagtagctgggatttcaggtgcctgccaccatgcctggctaattaagtsagtttcttaaagtcctacaactggtgagctgtgagctgtaaattgyggaactaatttttatactgccaatctgaggccttttctgacctcatcgctgccactgtaaaatgarttctagccccagaccatgacatgcctactagcttagctctaaccaaaaagatttattatcccaagagttgtgaaaatgtggaagaactagaactgtcattcactgctggtgggaatgtaaaatggtacaatgaatttggaaacagttgtccagtgccttaaaaagttaaacacacacatatgtggctcagcagttcccttcctaagaacctactggaaagaaaataaatgcttatacaaagtcttgttcatgaatgttcatagcagcatcatccatgatagccaaacgccggaaatacccaaatgtccattagctggggaatggagaaacaaatgtagtctatcgacacaatggaatactactcagcaatgaaaaggaactaactctggatacctttaataacatagatgaacttcaaaaacattacgctaagtgaaggaagccggtcataaaagaccacatagtatatgatgacatttatatgaaatttctagaaaagatgaaactctatagacagcaaacagaatgatggttgcctggggctgggagtgagtggaggggattacctggaaagggtggggcaattttggggggtcaagaraatgttctaggacaagactgtggtgatggctgcacaactggataaatatactaactawcatcaaactgtatatttacaatggttaaatcatatggtatgtgaatttcacattaataaagtcataaaaaatgaattccaggaccattaaatcaggtgactgagccaatagttacaggaacatagaaagattttcacccattctgtataattagacaaattctgttactatctgtccaacagtttagcaagagtcactctgagattgaagagaggaagggaaygttggaaccaatgctgatgagccattcataggctctggctcactatatatgtctaaaattcacatgcccctaaccctcaaataatgaccattaataatctggcaggagaggaaagacctgcagctcttctagtccttatgctatctcattgtctcatggatttttaatatgtctttgcatcccttagaaatttgcacttttcccccctttttccattaaaacacacctgcgtgcaaacgtccatacacacccatgtacacacagacacacacacacatgcatgcgatctgtaaaaagtcacaaaggccaaagttttaaaggaagaaaataaaaatcacctgtagtcctatcattcagagataaccactgtatgtttatttacattagttttgattacattagtttagaatgaaattttaaatacactagtatatgtaattaaaattgtatatacgttttagtcaaccatcagctgacttattcatgttctgtggactctrtggtgggtggggtccaagcctccctgaagcagatctctatcctgtcaccctgctggaaatgaaacacttaggggttagaaggggatcaaggaaagtccgagagttggttstgattatcttcagtcagaaagtgcctacttttccaagcatccagactgcaacctgtytttcctactcaaaatggtttttatggattctattcttatttggcaattgcctggactacagtcaccaacacaagtttatacgcaagaagtgcacacagccctccctcccagctcatccggtaacaatttagatgaaggatgtaaaataggattcatttcatgacccaagtctggtcaattgaaacagccgattgaagtgctgtgttgaaaaggattttgacactgcgcatgggctcgttgggaaagggtgtcatgatgggttactgattctgcggtatttttgtggacgtggggagtggtggcctacttacagtgcatcgcccactctgatttagatgagcaagagctgctgagttgtagatttctagtttctaaacaacaataagtcttgcycscagatagcctcttagcagagycaaaagccagcagagagaagactcagcatttgctttggagtaagtttgtgtgtgtatgtttatctcccttttactcatgggctcttttttcccaaataactgaggggccagcacatttggagaacatgggatttatcattgacgtcagtgccttgggagtctatgtttatgtgagcttaaaggttttggaagctgaatgacacagatcaaagtctctccactgatctgtcttccagtcctccaggggacttcttccatcaactacaaatcattgatcaaagtattggtctgtcacctgtccatgtgtaaggccaggcctaagtgctctgacagggcatgactcaatcctcaaacaggaagsgggaaattgctttccrtctcctaaccctaagatcctggatggcaggtaatctgcttcctcaagattctgttgatacacattcaggactctggtttctgttttgcttgatgacaatgacccagtttctttgactaaataaatgtatagacacacattacttcttttcattctargaatcataagtttttcaaactttagaatcacaaggtccattaaaggacatctcccctgaccttcccattttgtagatgggaagactaaggtccaagcttgaatgacctgccatcatggggataaccggaattgatacaatgtcttgattcaagattcagagctcattttttctgtgtcagattaaaaaaaaaacaaaaaaccctyactgatcttttaaatatgtaattcttcctcctcttctccccttgtctctcttctcacccctaccaatgtaatcagttctttttttcttttttggagacggaatctcactctgttgcccaggctggagtgcggtggtgcgatcttgcctcacggcaacctctgcctcctgggttcaagcaattctcctgcctcagtctcccaagtagctgggattacaggtgcatgccaccatgcccagctaaatttttgtattttagtagagacgggttttcaccgtgttgcccagggttgtctcgaactcctgagcttaggcagtctgcccacctcagcttcccaaagtgctaggattrtaggcatgagccaccatgcccggcctaatctaatcarttcctttaaatctgaaactgtcygcctgattctggtttaccacaaccaccagagtcttaagtgtcccaatagccagggtctcatagactctgcttatggttaattcttctggggaaattaatttctcgaggtaaaacaagtttttaaattatcccctatagctcatagaagcaattcagtaaatacttgttgaatatcaaatgaatgaacaaatggcattctacattgaatatagtaattcccaactttcgtgaaggttgttttttttttttttttaatgaggcaatcaggggtaaaaacccccgctgctgtcctaagacagaaagaggggggatttttccccccatggcttcgtccttattcttataacctgtatgcactgctgaacctgctgaataaccatgtcacagtggcaggagagggactgggtgaacttgagyctcgatgcctggattaaagccttgtaatgatgtttgcaaagcaccagggtgataactgaatggttggcacaggcttcgatgaagcttgtgtccaccacagtttccagtgcttctgcacctgggtggtcagaaatgagtcctgtgagacacaggtgacaagatctccaaggagccagttcacgcttggatgactctggagctgtggtgacaatctaaatcctaaattgaggcttactaggaaatgcactaggtracaggctctagagaaatggctattaccaggttgctcaggctggagtgcagtagtgcaatctcagctcactgcaacctctgccttctgggttcaagcaattctcctgcctcagccttccaagcagctgggactacaggcaggcaccaccatacccacctaattttttgtatcttttttagtagagaggggtttcaccatattggccaggctggtctcaaactcctggcctcaagtgatccgcccaccttggcctcccaaagcgctgggattacaggtgtgagcccccaggccctaccctgggcccctcctttctggcccctcaacctrttttcttccagccatgccctagggagagcttggctgtggccttgcagaccctctcagatgccactcaacaagggccaactggagagaaatctctagtctagggcacaaaatttctgtcaacccttctaaccagtgtttgaagtacgtaagacgttcatttccacttctaatgaggaattagaggaacggawttataaaggaattctggttataattgcakgtacttttagagacgatgtctaacagtgcaacccatagaaccaggctgcctggattcaaatcccagctctgctattactgagatctctatgagagctcagaaaagtttacttaatttctccaagtctcagttttctcataagaaagatgggcataaggaaataatgtagggaaaacacttgttgcagactgaggactcaacaaagttataattaaagctattactaacgtcattattatgaaaatagccatctttttttaaagaagggagttaaaggaaagaaatgccaggctgagagatgagacagtgaattacagtgggggataaaggggctgtggtgtcacacaggcctggcatctgtggccttgaacaagtgcattaatcactctaagcctcaatttctttgttttaaaaataattaactaaaataccttagggcacatggtaggaattcagtaaatgctcactgtctttctcatccttttgcttacctcacatttgcttgcagccagtgctcaaaaccatagacaggcagtgtccccaaccactccctgcgtttctctttctttgccttccgaagctgccatcttrgtggtttttgaagcatcaacacttacttcacatgcagaggccccttttatttatttatttttaatttttttgagacagggtctcgctctcttgctcaggctggagtgtagtggtgtgatctcagctcagtgcaggcttggcctccagggctcaagcagtcctcccatgttgacctcctttgtatctgggaccacaggtatatttcmccatgcctggctaatctttgtgtttctgtaaagatgaggtcttgctatgctgcccaggctggtctggagctcctggcctcaagcagtcctcctgctttggcctcctgaagtactgagattacgggtgtaagtcaccacacscagcccagaggccttctttaaatgctagtcctttttctcttcctccatctgggtcttggttccatgcgtattcagtttgtgaaaaatttgagtcgtgcacttattatgtatgtgcttttctgcatgtaattatgcttgataaaaaaagtttaaaaatttgttttagatagaggtttgaatgtcactaattaccaacgtgtagctcctaattggaattaagaagggactagctcctattatcagagatctggtcatcacccttcaagttgactatctccttatgctgattttttttttcttttaaatagcagcacaaatatttaccatctagcagatgtggtaagaatgtaagttgttcagccatttacagcttagtctttgggagatatccattcattttaaatacttggagggccaggcacagtggcttataccttgtaatcccagcacttttggaggctgaggtgggaggattaattggggctaggagttggaggctagcctggggaacatactgacacctcatctctataaaatattttttaaaactcagctgggcatgatgttgcatgcctgtcatcccagctacttgggagactgaggaggacgattgcttgaggccggaagttcaaggctgcagagagctgttattgtaccactgtactccagcctgggcaacagagagaccctgcctcaaaaagtaaataaaatagtaaaataaaacgagatatttggaaggctatgtttttttgccaggccatgtgcttagtccctgggagtatagcgaggggcaatcacaggtcaggtcctagtgtctctgaagacttcattctagtggccattgaaaatgtgtaactacccacagtaatcaagttaaagaaaggttctggctgagcacggtggctcatgcctgtaatcccagcactttgggaggccggggtgggcggatcacaaggtcaggagtttgaaaccagcctgaccaaccctgtctctactaaaattatttaaaaaaaaaatagctgggyatggtggcacacgtctgtaatcccagctactcgagtggctgaggcaggagaatcgcttgaacccaggaggtgaaggttgcagtgagctgagatggcgccgctgcactctagcatgggcgacagagcgagactctgtctcaaaaaaaaaaaaaaaagcttccatttgagccgccaggaaaggaggccctgagttggggagttgaatagagagctgcatcctgaacagacatgatcttgggtgagtgagaggctaggagcggagggaaagcagacgcagttgctaaagctgtcaagtcccgctcccttggaatgcagtcctggttctgctacctccaactgggtcgatttcaaaaaattatggacttgtctgagcctgatgtggtgcctggccagggctcactgcagcgcctggtatacaggaagaacttgatgttattcatggcaaaagatgtctggatggtctccactacagattctgatggcaagtgacttaaagacatgttggcaatgggtagtggacaaaaattgaaacaccttcaactgtgtctgtgaccagaagatttttttctttttttttttttttttttttttggctgactgtcatgacttagtaaggccatcacaggttgccagaacatctactcaactgttccaagcataacctcctacacaggcctkctacataggagtatatttggccaagactcaccactagaagtgatttccactggactttcctacagcaagtggtaaatgatccctcagataggcccaagagctccccttcaagcatagagacacaaccctgtgaaaacatgcattggaaccaggaaggcctgcccccatgacttcacgttgcatacatgcctttgaggacttggcctcttaaaggaatctttcaatatcctatgcttctgagaaagttactatttcatttgcagcaggacaactcaacaagctagctcttcctgcccagcagactcggtggattctgaagagggtctcgggctgactctctacttcatgggtttgaattcaggaatgttgcaagattgcatgagattaagccgctgaaacctttctgaggaagagccagctcaaatttcagtgttggatgttcaccgcttctttagggttctaccactcccagtaaatcaagtaataggtttctgttaaaaaccccagtgtgctgatctcagtggcrgccatcttgctttgtaagccttctctagctttatgatgctcccagtatataagacatttccagtgtctagtccaaattagtatttctctaattctcgagtgtctgatctgcctggctagaatgattaaaacaaaaaaayagcaaatcagtttgacagtccacttcattaagtggaggacagtgttttgattgctatttaatctgtttttccttctgtctgttcttggctatatggaattcactttgcctctsttcccgactcttcatatcccttatctcaaggtgagtatcgtcagaatcccggtacatttcaccagccaccttttatagaagcttagaaagatggaggcaaacccataaacaagacttggtttttctaagccacagtggcaatttcctagtcgattacaactgtgtctaccctttcaactggcctgtcagtgtaggctctgcatgtcctggataatcctacaattggtgacacggttattgacttacaggtttctagggcatctcattcgttttttaaaagaatgtttcttccacacttttattgcttagtagaaacttgttctaattctttctcctgataccatttagcctattagtacctgggaataatcaccctcccttatctagtcctacagatttgttttgttttgagttatacccactttaggtctcccaccctctcttatttttataaacaggctccatggtactatatacactgcagatggacagctgccaacctgctctttttgtgctgaggaactctrgatatttcaactagtttacatgactttcttacctaygctaccttataatccttttataaattttgctttacgttttaacaacggaaaacacttaaggtttttttcctttcttttttttttaattcttccgccagctatctttaaaagcagttctaaaacttcttattttaatattgtacccattgtactttagtctaagtgatggctgcttatggccatgccctttcttctgcactttgggtgttttgtctggaattttctctcctttccttttgtgaaaaaggatgaattttccragactctgttatgacagaaactcaccagttctctgttgttaatcaacaaatagattgtgaatgcttgactcttctctttttttttttttaaaggagtttcaagggtaagatctgctgtcttgtgaatgtcaaagaagtttctcattcgcccctttcttctctctcccastgtctttaatttgttaatgctttcgacttaytttgctttggataattttcaaagtactgctttctctagagatctctaaaaggcagaagttctggctattaaagatttgccattctcagaacagcccagttagggtaccctcaggttatttataactggattttatctcagaaaattaactaaaagaagattaaccaaaaatctaaaggaaaatgccttaaacacctcatctattatgctgtgctcaaacagatattttcatcttaacagcttggcaaacccagtggaacgctctttctagtttggggcataaaataagataacactctgaattcctacaggaaatcttgtaactctacttaaaattaaggcataaagyaggaaaatgtgtttcctctgtatagtcttattactttgcctgttaagttaactggttcctatttctgctggttygaagaggtccaggacatttaaatagctcttctagaaacaaattcttttccttacaagccctgccaggtcagtgggttcagtaaggaagaaggttttgtattttgacaattccttcatctgttaatttagtcagacgaggaaggaaacgagaaaagttattcctatttcatccatctaagactttatatcccatttcaggctgattaaaaggcaaaatcktcacagtaggacaccaaaccctctgtatgccctgcctgcctccccccctctgacccgcctgcctccccvctgtgagctttttccacctactggcctcttgttcttcttcagctgttcctcagacatgccaggtgtgttcctgtctcagacgctttgcctttgctgctccttctgcctggagtattcttccaygtagcaccaygagctgttcttctccaaaaggctttgctcaactgacactttctcagtgaagctgtttctcaccactcactataaaatggcagcctgcctctctgagccttgcaccctctcttccttttcctgctttgtattccttgtggcacttattatatcacatagatacagacatagatgtggacatagatagagacatagacatacatgagttttgtgtttattctcctattctctagaagaatgtaagtttgtaagtactgagatttttgtctcttttgctcactattgtacttcagggcctagaggaaggcttagcacgtggaagacaatatttattggaggaatgaatctagaaatatccttggatgtataatgtccaactcactctaccacacagcaacataggtagttttatatacattttatagctaagcccagcagcccaaaaagctaaatgacttcagcgcccacagatactcctggatgagaggggattggaawccaggtctgttcaattgcaaatcccctcttgtgccttttacaggtcagatgattttgtttttataggctctagcaggtcccttctctttgcgtcaccagagaggaagatcccctaagacaaagcattccctgtagtttttagcataactagtactggctsagtaagtatccactggggttsggaatacaactgccctgcctcttgagcagccatgcctgcttccgaggtggtgctgmatgctattcaggaggacagaccatggatggraatcctgagccasaactccttagcctcatgacrttgggcagatgactgagcttgtctgagttacaataaayaaaaataccatgctgaatgatggcctagcatgacattgggaagtacagactttgcaggcaggcccctgggttcaattcctgcccctgtcattgagtaaagtaattatcataactttggaacaaattgacctctctaagcctcagtttattcttcagctaaatgaggatgattgataatcaaaactattttatagggcttgggggagcatcaaatgaaataacacatataaaaggcttggtttaatctctgaagcacattggcacttaataaatgttaactataattatattaacacctattttacagggttgctatgaggatatcatgagataatatgtatgaagaacctagcacactgtttggtgcatgtgagggttctgtaaatgttacccattttattccttaatttcctttatagacccctttccctgcaacacccagtagtctggcttctatcctgacaatgttagtgaagttgcttgcttgaaatttaccaggccaggcttatggctgtaatcccagaaactcaagaagctgaggcaggagaatccctatgrtctcttgagtccaggagtttgagaccagcctgggcaagatagcaaaatactatctctacaaaaaaatgaaaaaaaaaaaaaraaaaaagcctgtcatagtggtacatgcctatagtcttagctattcaggaggctgaggtgggaggatcgcttgagcccaggaatttgaggttgcagtgagctatcattgtgtcactacacttcaccctggatctggaaggaagggaggaaaggaggaagggagggaaggaggaatttactagaarcaaattaacttctgtaatcctaagtacttgttaaggcagaaaaacgcagataagaaaatcgaagttgagggcaaggagctcatctttcacggtcatagacctcagttgcaacatctggaaaaagagctggttgggcatgccgggcaggcttttgtgacaatgtaagagsaagtgaagattgcatctcagtatgagacaccgtaagagcttgataaatggtggaccctctgatgttgacaacatgatgtcaaagatggtgtttgctgttgtttcaaatgtcttatttcaaattcccaattagtttcttcatgccataaggrcaaaatccacatctcatactttttcaggatctgctctcacttccccaaacatgtaataccaccctggtcttmaagtccactctcaaaaaaaaaaaaaaatttggcctttggcctcgtgaccaccaaatctgatttccatccaagargcaacattgtttgtgcttagaaggaattcctggctgggcatgatggttcacgcctgtaatcccagcgctttgggaggccgaggcaggcggatcacctaaggtcgggagttcgagaccagtctgatcaacatggagaaaccctgtckttactaaaaatacaaaattagccaggcatggtggcacatgcctgtaatcccagctacttgggaggctgaggcaggagagtcgcttgaacttgggaggcagaggttgccgtgagctgagatcatgtcattgtactccagcctgggcaacaacagcaaaactctgtctcaaaaaaaaaaaagaagaagaagaagtaattcctaacagtctggaatctctagggtctctggtattatcctttagtttaagcctcacatttttctaaacattttgaaatctggtgtaatggcgttagatgaccaagaatttatagtcaaaagtagataaagtaaaagagtgaaaacagagacatgatacgagttgatgataccgtatgcaacttgtcaaacacttamatttgtgaataagaaaactggggtctatttggtggtttatttcagagatgttggatcaaatcagacatcagaaaagacamcagtaccaaacgaagatatctttgctgtatttgcagttttctctcttattaacatgaaaacaccttacatagatggaaacatctaaaggctattttttattttattttccattacttcactctaatgctttcacccgtacctgtggaaattagactgtcacctgcttttagcatcctgttttctttcgtgtttgtaatgaagccctccgggaattatgcgattacaaaaatgagttacaaatcctcattcggtatacgaaagtatatagctgctttccttctctgtttaaatagtctacaaaacaagaaataattagtcaagcactatcggtaattaagcacataagatgaacattaaacaaactgcaatcttgcatcattttgaaggtagataggcaggtttttgcatttggaatccagccaaaatgcccatcttcattccctttgctccttatttattattggtgagggaattcacttgccgaacttgctgatgtactcttgctggcggtccatctgagagttcacataagtgtgagtgactattttttgacaacactacctttgggagaagatggtttcaaagaactwactgtatcaaatggaaagacaatgtgttttcccaacatgggagtatgtttctaagttgggatcagttcacgattcagagaaatgctctgccttcttgtctatgatatcagatcaggtcagacgtaggtataagaccctgactcctgttttccaagcacttttttttttcattatgagtctatctttcggtcccctaaagcttctggtaattttttttctttttttttttttttttgagacaaagtctcgccctgttgccaggctggagtgtggtggcaggatcacggctcactgcaacctttgcctcctgggcgcaagtgatcctcctacctcagcctcccaagggagctgggaccacaggggcacaccaccatgcctgcctaatttttgttgttgttgtattttttggtacagatgggattttgccatgttgcccaggctggtctcaaaactcctgggctcaagcgattcacgtgcctcagcctcccaaagtgctagggttacaggcatgagccactgtgcctggccctggtaaaattttgtctacrtagttactgctgcccaggcaaaatctgaaaaatgttagtctaatttagttaagtttttcttgcagaccagaacttctaggaaactaatatacaggttttctccaaaatatattttcaaggaaaatcagagaataaaagtttccaatgcatttagactagaaaattaaataytcaacaaacaatttcggagggccaactatttgccaggatccttgctggaatagtctctaacctcaaggcaattgctgtctagctttaagatcaagagtaattgtgacttgatgtaaggtatctgtgttgctttgtattacattcttcttagctccattgtgttaaatacagatagacaatatttgtacatgataggttggctcaccattaatcacttaagaagtaatagaatgatcaatgattttctttctggcttgtctacgccaaaatggttcttctgctcagttggtttctatagtgattttatggatataggcattttcttctcgaattagaagaactgacagtccaggcacggtggctcatgcctgtaatcccagcactttggtaggccgaggtaggtggatcacttgaggtcaggagtttgagataatcctggccaacatggtgaaacctcatctttactactaaaaatacaaaaattaggtgggtgtggtggcgcatgcctgtaatcccagctactctgaaggctgaggcaggataattgcttgagcccgggagacggaggttgcagcgagccgagatcacaccactacattccagcctgggtgacagagcaagagtccatttacaaaacaaaaacaaagaactgacaataaatagttttctccgttttgtgacttatttttaattattaagaataagtgtcataaagccaatactttctaacatgtgtatagtatgttatagttttcaaagtctttgacaattatacctagggagccaggacagtatttgtatcatcatttcattgttcctggaaaacaggttcagagaagttaagcgacttgcccaaaatagcacagcaatctgacagagccaggattatcttccatcctctattttattacctgtgcctcccattaaatcatcctaagctccactacagctggagaaggttctgttaacacaccatacatcttttttttttttttaattgagatggggtctcactctgtcacccaggctggcgtgcattggtgggatctcagctcactgcaccctccttctcccaggttcaagtgatcctctctcctcgcctcccgagtagcgtagctgggattacaggtatgtgctaccgtgcccagctaacttttgtatttttagtagagacaggggtttcaccttgctggccaggctggccttgtatttctgacctcaagtgatccacccgcttcagcctcttaaaattctgggattacaggcatgagccaccgcacccggttatacatcttaaatataaagtttttacaatgccaccatttaaaaaaaaaaaaaaagggcattaatgcatttagcaaagacttcctgagtgtctgcttggtcgagtgacacaaactggaacagagcatagcctgtcttccaggaaccggcaccagcratgtcgtaggctgagggagaagccacagaactgtgagtgacatgtttctttggctgctcccgacacaaggaactgcaactaaattgaaggcttgaggacaggaagcaccttagyggttcgcctttcatttgagtgggcccagggtccagaaaagggtagatattcaggaagaattgatcaccttttggatgccaccacacatgcctaggcacaaaataactcagaaaacagtgataaaagttgtgattgtggttgttgtggaaattaaagtagcctcccctcttaagctttgtgaacttcagcaagctcctgaacccatctggaccctctctctcatcagtaacgcagtaacgtagagatgaaaccctaaatgccatccggtgacatcctggattagaccctgaatcagaaaaaggactgtagtgggaaactcgtgaaatcctaaatacagtctgtcatttacttaatagtaacatwccattttcataagcataccatgggctgggcatggtggcttatgcccgaaatcccagcattgcgggaggctgaggcaagctgatcacttgaggtcaggagttcgagaccagcctggcgaacatggcaaaaccccatctctactaaaaatacaaaaattacctgagtgtggtggtgcccacctgtaatcccagctactcaggaggctgaagcaggagaattgcttgaatccaggagatggaggttgcagtgagttgagatcatgctactgtactccagcctgggcaacagagcaagactctgtctcaaaaaaaaaaaagaaaaaaaaagtaatgcaataagcgtaccatggtcatgtgagatgttgacattaggggaaagacaataaacagcgtggaggaactctgtgtactctgtttgtaagtttcctgtaatactaatattctaaactaaaaagataatttaaagggaaagaaaacctctttatgatagtaacatcagttggtataaccattttggaagacttgatttacataggatcaaatataagtatatctgatcccctagaaatttcacttctggccaggcgtggtggctcatgcctgtaattccagcactttgggaggccgaggcaggcagattgcttgagcccgggagttcaagaccagctgggccaacatggtgaaaccctgtctctacaaaaatattagtcaggcatagtggcgtatgcctgtagtcctagttactcgggaggctgaagcaggaggatcacctgagcccagggaggtcaaggctacagtgagctgtgattaggtccctgcactccagcttgggtgacagagtgagaccctgtctccaaaaaaaaaaaaaaaaaaaacaaaagaccatttttaagactatgactggtcaaaatgtgctcatacatttgccaaaagacaagtacaagagtgtgtttagcagcattattcattataacacactgaatcattattcatgattactcaagacatctggtaaaccacccagatatctatcagtggtggaatggataaataagttgtaataaatccacacaagaggagactactcaccaacaagaatgaatgacttagaactaaattcaacaatgtggatttatcttacagagatgatgttgagagaaaggaggaagatacagaggaatgtatcctatgtgattatagttacaatgagttcactaaaaagcaaactattcctattagaagtcagggtagaggatggatgggagcatgaagtgtcctccgtcatgttgctaatgttctgttgcttgttcaagctactgggtgtgttcagtttatgaaaattcatttartgacacatgtatgttttgtgaatttttttgcatgtatattttactctaacaaaaagttcatggacaaatacaaaatcatatctgacagttgttgagagaattaaaggaaataataataatataaagcacaatcaatgcattccatttattcttctgcttttcccatcaattcatgttacccagtcattaatgcataccctctgagaccccaccaagccatctagccctcagctgtgtcactgggcagttgtttcttccactgtgcagtgtttcgttcttaaccaacatggcaccccaggttcagtggtgagagtgtcactggcaacttctgaaataacatctctgttagtttgtggagtgggctaaatggccagcccttctacgagctccctcatggttgcgggggactaccaatcactctctactttttttttttttttttaataggtcttgtcatttgtaaatgcagaaggaacactgaaaaaaaaaatactcttgccttcttccatctgtattttctttactaaattatccagtcttataaatatttgaataacatttggtcagtataaaatctttcctgtcagctcagtacaagaacactttttggctcctgagaccacaacagtcagataaattaatattgatttgttagaaaatagttttcactctgtctaaacatcttattctgggctcttgaaccaaaattatgaatttaaaagcagcaaaatagttcttcacagttttcccagtgaaactaattatgggcagattgtgagaaatgtgttggatgtgatttccaacatagagttctgctaaccaaaattcagagaaactagagcctcagtctctgatttatttgagcaagttgcaatttggtagactggagaatttatgtaaatagtttttgcagtttccatagggataactcaatacattaatatctcacgaatggcagaagatgaagggggaaagttttttttttaactgatagtttgatttacctaatagaaggatcggattcttcccccttcttacttaagtctatatattaaagaacagctggcttacctgctgtataaatatgcagtgtgtagaatttgactcagtttagagttgagttttaatcacatccacgtacagggatggggatggaattttttttttttttttttgagacagagttttgctctgttgcccaggctggagtgcagtagcaccatcttggcttgctgcaacctctgcctcccaagttcaagcaattctcccacctcagcatcctgagtagctgggattacaggtgctcgccaccacaccaggctaatttttgtatatttagtagagacggggtgtcaccatgttggccaggcaggtcttgaagtcctgaccttaagtgatccaccctcctcggcctcccaaagtgctcrgattacaggcatgaaccactgcgcctgactgtacttttttttttttaaagtatacccatacccattgtacacatttggtattttttctttaaaaaaaaaaagcatttactttttgcctcatgaatctctgagtacattttgtgcattctgtattctactktatttactcaatattaattatatgagaaataaatcctaaatgtaattttgaatggtggcttcacaaaagaacatttcctcttcttttggacatttgctcccaattttaaataacacatcattgaacatctctgtacaaaattccgtatctgatcttcagagaagttttaagatagatgtctagaatttcatctcacatctaaactgttttaagacacttggtacacattgatatgtattgtccaattgctttccagaaactatataaaatattacaaagaaaaacatatatatatatatatgtaaaatatatatatgaagggagaaataaatgtaaatgaaaagaaaaacatatagagaaagaatatgtctaaaagaaactgcagaggcagctataattaaagcacaaggaaaggctatgaaattctggttccacctgcaacagctgtatggtaaaaagcttattcagagtccttccttcttggaaagctttgttagagtcttatgggattgtgatgcacagatacaggggcaaggctactttttcctcgaactagttcaccaaagcttctatcctatgaaagtgaatataaaattcttaaagtttatagggtctgctgggtttaaggaggagaaatttgagttttcgtattgtcagtctcaaaccttttctgaaattggaagtgatgaagtgacagtctggctatatgtgtgtgtgtgtggtgtgtgtgtgtgtgtgtgtgtgtgtgtgtgtgtgtgtgtgtgtgtgtgtgtgtgtgtatacctagtctagggctaggtttgggaactattttctcccgtaagttaaactgaactagactgtatgtcaaaaaagagtctcaatgtcaacttaatccattgtcatgactgtaaaatgctatttcattataccagcaattcccctgtggatttctcctgactctctatgcagcccaactctattttaatctgttgtagcttttctttcccctctctcccaactccccacgttttggaattattcagtgcattcgcttccaaggcacctgtttgatatttacacaaattatgaaagtaaggtgggaaggcaatgaaggcaacaaagtatataaaacacacacacacacacacacacacacacacacacacacacacacacacacaagaaatgactacagacacctcaacacccttccaaaacacttgaatcattttcttcgggagttgaacaagtggctgaaaatgccaaaatccatcagccaatgtgtaagtacaaaagggtcagataagatatatgtggattccataaaatagtgcatttgaattcccccaggtcttttaaagatagtggttttccagatgtgacaaaacaaaagaagatttccaaatcaaaattcccatttgcctttcgggatgttgaattttctccacatttgtgcaattaagagttttgctgagtgagcttaggactctgtctctttaagtgtttaacagtaattggttcatgtcctggtgttcattgaaaatcctagacatttcatgtaaaatcttcttaatgaggggatgaatttttcattcacattagaaagctcactctgacaaacaatttctaaataaaactttggcgacatgacatcccacattggacttgtcagagaggacaggtgcattagaatataactgtatggcgatccttcaagctgtcagccatgaatattttatttcttaatgaatcatctttgtgaaatcaactttcttgttgtagtgtcagtgccatttacaacaaaaagctggctccttttaaaaggtgagctccttaaagatgctgattcctgcataaaatgtttaaccctacccaaggtgttgggcaactgggggctttgtgctttgcttctcccttctgaaagtgacttgagaacccactttgggctagtgtgattacagtgaggagaaagctttccttgatttgttgtttccttctcagaactgaaatcccaggtacctgcccagaggcagctcccttggcccttgggtccctgttgttccaggtgttactcctattctttttgtagttgtctagggatttagtttctcacatcctgaggtccactaggtgctattagctggtgctaactgacagctctaggcagaaagcctttctcaggatcccagcttccctgtcttccagaactcaaagacggcttttgtttgttagttttgaggatggagacagctrtcattctaatgaggacttaaatgtgtccctgctgaccgagccagaacttatttttatgttgccactaggagtcttctgagatgctcttgtggctggatgtagaatcgctttgctcatctctagacacagactagacaacgaaatacattcccctaaaatagcccagggttagttctatgacctttgtcactgttggtacagttctaagaggatattgattttttttttctttttaattcatagtctcaactatgtctcaagactgcccagcagtatttctgtttactcgatctaatttctcttccattcctcacagtggcaatttcaagcttctcctttttccccaagccccataatctccccctgatgcccttagaaagcttccctggtcagtcctcctcaccacctccagctccccctagaaactgaccatttatcccatcccggctgacttcttcccttttacaagaagatgtctctctttgaattcaactcagaggtcagcttcactgcctgccctgtggagtcgactctgtgtcccacccttcaggaatacggcttaataataagatgataaggattcgtaccagggattggcaaatgacagtcattttctgtttccttaagtaaaattttattaaaatacagctccactcattcatttatatattgttcatatctaattattttcacactgcaatggtgcatagtcaaatgctttctatctggctttttaagaagatctttgtccctcccccaccccccgccccgatttatactatggatcagcagcctaaaccctgcaaactgggtcccccatctaagagtctgcagtgaaacgcgagccgacttgatgtgtctcagagtgatcattcttgcccttggcggttgatgctagactgttgcagcttcaaatataatgtattttagtgctatacgacagccataagtattggcctgtgtccactggtctccactaggagaaaaccgagccaagcttgaaagtactaagcgtgcccaggggaaatggaataagctagaaatttgttgtttccttttcactaggtttaagtgagaatatttgtgagcaaactctcagtgtgggcaggtgacaatttctgcaggtattttccccccattttaacttgtgcgatatagttccctattttgttttgttccgcctcgatcacaacagctgccacccgaggtttaaagatactgttgtcctcatcttcagaacaagggttacgtttgctgtatctggagaaagtccatagtttatgatgaattttctattaatgtaaactcccactgtttataagtcacccaaattgttkgtattaaattagatgtgtaccatcttatgtctcttctttcagaaaatgaatctctgtttttttttctctttctcctaaatgttaggaattttctgaagtttgaaaccaagtggcacaaaaacattgcatttattacataattgctcctagggaaatacacatacacacacatgtacacacatacacatacacacattttttcctaaacaacatcaatgtcataacagttttgaagcacrtatacacactgacacatagattttgtaaatgaggcacatctattcttgaaatgyaattgcttaaaaatggaagttctgaaaataaataaaaagaaacatcaataaataaaagccccattttcatattcttatttgacctcttgcctctccatcattcttaaatttgacctccatcatkcttaaatttgacctccatcattcttaaatttgacctccatcattcttaatcctcatgttcttaatggacatccctcccaccctatctkggccttctgagactgttcccccagccccagtcaggagggcttgtccacaagttgctgtctgaactgggcaagcctcctggcttccctgaaatggtgctgatgtcttcacttcctgccaccttggcaacctttgtagttsctctctttttgccaggggaacaaattaagagagagaagagtgatagtgtctacatgtggtctgctcactcagccagtattttccacagccagtctttccctagaccagcatctgagcgtgccttgtctatgggccacctatactattatttactgatgacttcctcattcactttctgttttttatctaaatgccagccttagccttgttcaaggtaacagtatacaggaaatcatgggtttcgagcatgttttgtcaatatttagtaaaatgcgttcatagctattattataaagactttaggtacattcctgcaccacttaataactgaatcaatctcctttcatcagggggaacaaacctgtctttggctcacactgtttgaggatataaaaggaagcatacagtgggcctcattctgacaaatttttagtaaatcacaggttgcctttcctaaatccctcaatatgatggctagtctgtttcatagtgaataaaaagtgatcctggatgaatgaataaagtgaaattcagataatttttctcaaaactgaaattgtttamatcttcctttagttctcttttttctgcctgccccttctttcatataccctgtttttcacctcttttgtctcagtcccatctgatatttgaataacaatatgtaatttcaggtttaggattgttgatctgtaaatctcagcctagtgctttcaactcctggctttctcctaagttcaccctcctcccttccctcctttctgtaaggactctaaacgattgcgcttcattaagttatttttataatgagttcctgttaccagggaatacagagttaaaaaggtgatctcactaaaagtaattagcataagacctgctggacctgtagaagtgactggatggtaatcaatagcaatatgattacacccatgcagcaattataaattatttaaaacactacccctaggttactgactagttgcctttaaattaaattctctgtcgataattgatgcaaagaattaatgtgagaacaccttcagttactgcaactttttcaaggtggcataaaatattgaactattgcccgtcattagcagctaagctgtctgtttgctctaacatccttcttttctaaattggtcaagaaagagtctcagatcttgaaagatgacaaatgatttcgaatccactgctgggtattcttctaagagcactgaaatgtcccagtgagaaatttcatatatgaaggcaaaggaaaaaaaaattaaactttaaataatgaccagttatacttcatcaactctaacaaatgaaggagcagagttggttttcyggagtttgcttcagttctttgatatggtcagtgtaggtcggggaggtcttccctagcttgagaaatcataacctaggatatttaagctgtcagtaatagtgttttaaaactccaggcctataataaagtaaaaagtgtgtctgataaaatgggtttttttccttgcttagtgaatgtcttctgtttctckctaaacattgtcacttgccaaascatgttttctgtttcatactaattttctactggcagtgagaccagcggaatctaagaaattgcatacgaaattcaaggattggaaagaagaagaggaagtcaaccattagcaaccctagctcctctttaatctcaagaggcaagaggtactcgatgaaccacatgctaaaataaaaaaaaatgaaccacatgctaaaatcaaatggcttctgcacctgtgtgcgttcctggactctggggtcacaggatggctgatgwgatgccttcgagaaattaatactctaatgagggaaacatcctttcatgttggtgcaagagacgttctaggcctggttctacctctagttggaacggtggtcatggacaggtcacccccgctgtccagaacacatgtcaagaagtgggagctggacgacaacattcttgttcagagcgttcttcctccacattttatccaaagcagctccacttttacctgtgttatctactgagattctgcgtgtgtgaaacacaaggtcacctgccaaaagcaaaacaattaggccagcattgggctaggtgaggatccattgtcttttgggcaggtgattgtgatacwataggagccggtgtcctgttgatggcatcccacaactttctaacctctgttgtagagttttgttagccacgatttggaccaacctgcagttaggccaagggctgctgatccaattggattaaggaactctgctgtttgagcatgttggcttcattcattggtatctcctacgccaagtcctaggcttggttacaaagggcaatgaagggtcttttctgtccttaagcactcacaggtagcttaacagtaatgccttggattccttccttcaagagcgayagcaggaagcccagcttctctggtagcagagcaggggtcctcaaagcagaccgtgaggtcagaggagcactggagtcaggagtttccatctccaccctgctgagtaaactgtagttacccacacagaaaaggaggctctccaggctgacagggtcacaaagacacacgactatgagatggaatgactatagctagaaaaaaaaaaaagtggggatgcccctcttgaccatcttatgcctgaaataagggaagacattcttcttttttatctgccaacctcccagtgccacagtaagcacagagtcaggcctcgaaaaataccagtcctttcgcctgtcccctctcacatggtttgaatccaagaggctgtcataccaggctcccccattcagtatattttctttatgtttaaatagtttggattgacttctcttttcttttatttttctgttgctacttaggaaaccatctccaggctagaacaagtgcctgaaatagagaagggtgaggtcactgcctaagacacttcctcctccacccactcctctctcagactcagctccttccacttctgcccacatggctgccattttaatttttgcttaaatgttgcagccaatatttcatgtattgttgttttcttccttgcctgggagactcttttgtctgaggttccctggtattttccaggggcccttctagcacttctgtgaactcattagcttccccttgttccagaaaatgtctgtcatacattacgtgcctttctctgtctttccctgcccctctcaccttcatcgatcacacttttgcttcacagaggtaagaggaaatcamactcacacagtatcttttgttttctagcaagctagaacacaagattttctagatgcatcttttgagttgatatgcaatattttccttgacagatttgttaccagctgagcagatattgtgtctgtgatgtatttgagtaccaggtatccctgattaccatagagtaatgtcttttattgaggcttttattattattattattattattattattattattattagagacagggtcttgctttcttgcccaggaaggagtgcaatagtgtagtcatggctcactgcagccttgacctcctgggctcaagcaatcctcccacctcagcctcctgaatagctggagctacaggcaagtgtactgtggcaattgttaatgttcacttttatttccatagttagccttgatcgtttagttttaaagagttatacaacacatacacacacatctaattgttgtgttattgggttaatgggaatattttagactcaagcctggttctttgcttctctccagcacagcaaaggatacacctccaagtataatattgaacttcaaagttagtaatgttcagtgatgcttaagcatgtagatcataaagtcctagactattttttgtctaaattattgtttgtagtcagcctctctactggttggaaacacaggcttgagtttggctttctgctctacctagttcattgctgcagctgtaatccagcctgattctaattttcaactggagatggttgtcttcttttttattccatgaaacaaattgattaatgtgtcgagggagcaaggtggtacttatacctacccagcctgcttgtgtgtgtctcaaggtggagagaggctgtggaaacaatagagagaatagcatggaaggccacgttgcaattaaacaagattgggaaagaagacgggactaaaatcatgccttgaagatgtttatcatatgaagttgaccttgagaccccaagaccggcttcagttttccacaatgcggctattatgagaaaaacagtgactaactgagcactgtgcataactcagttctcggaattttcaatcagaaattatctgatgacgggactaattcttattacgatagttccaatggatccacccaggatccacctccacaastaggtgtacagaagctggagatcccatcatgccgccgggcaccggtttacgagaactctatgtcttatcttggtagtacgattaggaaaacaaacacaatggtttctgccttcaatgtttccatggtgagggcagttattaggcatatgctaaagtgtaatatccgctttttcaaaccacatttcaaagttgatagcatcaacggctttaaaatcacttttaaagaatctgggcttacccagttaacagaaatagaacctgcctgtttatcagtgggtttgcctcacttttctgtgggtttcttttcttttcytaattatgcattaagaaaataacttaagtttctgtgcatacaacatcttcctttctcattcccagtaccctagaaacacagccgttcactgaagaggatttgagtgttgtctcctctgtggggtcamaacatcatgcttctttctgttctgccccatggcagtggtgacgatggcctagcttccatcccgtagcttcttgtgtttttctattccaccagtctatcaaccctgtatttgttgtcaaatttacactgtccacaggcaaagatcyattctcctttagaatttaataggagggtttggaaatgatgccatggaaaccctgagcagcttggcaatgctgaccccaaatgagaaataactatcattggtgttttccttctactactattatcttgcccattgatcttcaaaaagttcattggtcaaattgattgaggaacgcaagacttaaatgtaatatggctctggcaaattctgagatgctaacaaaaacaagttttcttaagaacaatgtcaactgactcacagtatccgactatataaagtcgagtgctctcatgccaggaagctgatacagttcatgaaacctcagtcattctttcgtattactcctgtcttctctttggaaaacaatctcatgaatttggtcttgacgctgacttaacatcccaggaaacagatactcaattccactgtcttttttgagaaatgaacagttctcaaactttgtttaaatttccttttcacagatgagtaataaccaaagatatttctgaaagggctctgaaaacatgcaggcaattgatctttaaaaataagatagaaatagtaggttttataaaagaaggaaatagaaatacttcagaagaaataaagtgtgctgaatcatgttttaaacataattatatccggaatgcacttacccatttgaaaaaaaaaaaaagtcaccaagttgtttccaattgtttttgtarrtttgcttagtcattttcagagacaaaaatttgggaaaaggattgtagaatsactggcttcccaaaaccacttggtgtttacaaagttatcaaaaacgggctgggaccactgatggtaataacaaaacctggggccctgaatcgtgtattctacatccgttagcacactgaagccacaccgcaaacttgtgaggccagcgttgcttcccctaccccttccgtcaaaaaccgtctgaggctgatcattaacttgcataaggtcacatagctaatgagaagcaaacgcatcataatgacctgggacatatgacactgaagcctactctctttccacaaagcttgatgtactcagatagtaattagtaaacattttcataaataatcttaaccttttcaagcatttttgtcgattggattgtagcactcaaaagtaaggtctgttttactaatataaaattgggcctgtggaataattctcttcacagaagtgtgtgtgtgtgtgagagagagagaaaatgtatatgcatacatatacatatattattgagacataatttacataatttatgttctataaaattagcatattttaaatatacagttctctggattttgaaaaatgtatacgtgtacataatcatggatccaccaccccagttaagatatagaacattccagggccaggttcagtggatcatgcttgtaatcgcagcatgttgggaggctgaggagggtggaccacttgaggccaggagtttgagatcagtytgggcaacagggtgaaaccccgcctccactaaaaatacaaaaaaaagaaaaaaaaaaagaaaaaaatagctggccattgtgacatatrcctgtaaccgtagctactctggtggctgaggcttgagtatcgcctgggaggcagaggttgcagtgagccaagatggcactgctgcactctagcctgggtgacagtgagactgtctttaaaaaaaaaaaaaaaaaaaaaaaaaaaacccaaaaaaacaaaaacaagaacattcccatcacgtcggtaagtatctcattctcctttccaataaatccttttattcccagaaacaagcattcttgtttcaatcattgtaactttgttttacctgttctagaacttcatttaatrgaaatcatacctactgctttgtatgtgtcgtcttctgcttaatgattcacataatgtttttgtgattcatccatgttgatgggtgtattaggggttctctttttcaatgctggatagtatcctgtggtgaaaatacaccacaattcgcttatctgtgcacctgttgatgagcattgggttgtttatatttgttggctattatgaataaagctaccacgaatattcataaatcctgtatacatgtttttatgcccttatgtttttatgtatttttgataaatacctaggtgtgaaattattgactcttagtgtttaacttgtaagaatgctgccaaacagttgtctaaagtaattgtatcattttaaccccycgctagaagtgtgtaagagtttatgttgcttcacakcctcatcagcactttgtaatttcagtctttttaattatagcctttttgtgggtgagaaacgctatctcttgctagttttattttgcattttcctagtgactaatgcmtctttttatgaactcattggccgttcatatattttctttctgtgaactgcttgtttatgtattggccattttctaaaaattagatagtctttttaatattgaattataggaattctatatatattttggatacattctttttttttcatatgtactgtgaattttctcctttgtcttgtctatttattccttaatggtatcttttgaaaagcagaagttataaatactgatagtgtccaatttatctttttcatttgtttagtgctttcttgttctaagaacctttaccaatcaccaggtcacaaaaatattttcctatgttttcttctagacastccataacttcaatctttacattcagatctatgttccatctcaaattaatttttgtatatggtgtgaggtaatggtagaggtttatttttctctccataagactctccaattgttctagcactatttgttcaaagactaatcctcgcgctattcaatttccttggcatctttgtcaaaaatcagttgactatatatgtgtgggtgtatttctagactgttrtactccattgatctaattttttttcttatacttacygctcgattgcctggaagctaggtaataataaggattcaaactttgttctttatttcaagattgtttgggttagtttagatactttccttttacatatatatttcctgatcagcttctccatttcttttaaaaagccttgctgggagtttatttgctttggtattgaatctgttgatcaatttgaggaggatcaaaatcctgaaagtgttgagcgttaccatccatgagcatgcatctctccatttatttaaggcttstttatttataaacatttcagtgatatttgatgattttgaatgtggaggtcttatacttttttgttaaattaactcttacacatttgatttttttatgctattgtaaatggcattataaaatttcttttttccaactgtttgtttctaatatatagaaatacagttgattctagcaaactgctctcatatcctgtgatcttaaaatttatttattcaccttttcctttttgttaaatagattctgtagaattctctacatctctgaayatagttttacttcttctccaatttttatggcttttgtttctttttcttgttttaatgcactggctatagcctgtaggacagtgttgaacagaggttttgagacagacatmattgctttattcaggacttctctattatatgtgatsctagttgtatgttttctgtacctatacttcattagattaaggagtttgaatttatttctagtttgctgagagttcttttataaatgtgttcatatatatatgttttatatttttcttattcttactatctgcatattagagggagtttagctcattggttaaaaggatttgttccggaaacctaactccaaatctttgaacttcctagaaacctggcctgtttatttaccccgtatgtcactttcctttatctgtaactggaaaatgtgtacgaagagcttaatacaatgactgatacacagtgagttctccataaatgttagttattattttaatattacagcatctgtggaaacagtgggtttatatttcagcgtcctgagaaacactcatcctgaacaaygggaacattggccrcatcygccattgtcaattttaaataaaagatatgatgactagttggtgagttgatcttgtaagacttttacagatacccagaacggctctacttcttcatattccactttttagttttaaaagtttaagkagatctctgtgatccctgaagaattgtgtgcaaagcagcattaagacgaaaatcttttatatttgtgttgtagcttggaaaactagcgcgtggtctgttttgttccactggctcctaaggttcaggtattaacataaatacagcccattaacacttgttcctctctgtcaggacataaattaagtctgcaggtgttccatgaagctgtacccttggtactaattaagccttgataattaggtttgttaaattcaggactttaagcttatattccctccttgggctaccaaaacggagatgtgcaatatacaagccctcctgacttttttttttttttttttttttcctgcagagagcgttgctgctccttctctattttatttctttattactgtttttttaaatgaaggagtcagtaacaaaccgttcatcattttgccagagtagggtgtaaaccttcatgcagacctgtacatttgtttatgacgagattaaagtcttttctcctcctgttttgtgtcagctcagacactgaaggggaaagtttccagcctggtttctccatacactgaacatgttgaaatctatgccttaagcccaaatgarctgtcactcaagtatgcacgctcatattattaaaaactgtgcatgtaatttgctgggcacccaaataatttgttttttatttttccttaaaaatgagactttctgttaggaaagtgattcatgaaacagtgaagatcctgcctcacaactttcaagaaaccsacagaggtccctattcacataagaattttctaagcagaggttccaatttggatatttcgtggccttcaggttatttgtaaccagtacacaaaccacaaagtcataatcagatagattttctttccagcctgtctttcctctttggttgctttgtaaatctattactcatcagatcatatgtttggcaaatgccacttttcattttgaatcaatggaatcataaaaaacaattctactagtaccactttcaagaatattcatagtggtcatgctaacgtaataacctctcttttttatttgaaggatattaaataaaattgtacttttaatcagagcctttttttgaaaaaaaaaaaaaagaaaaagatagttgatattgtgggagatggctacaatacagattcatcccatattctctttaatgttctattcccaagaagagcactaattaatctctctagaagggtaccacagtttccatgagcgttcatattttgaagtttccaagaacatgttctacagaatggaccactgctctcttttcagacccaacccttgtatcagagtttgcacacatctagaagttccggttctcccagtcattacctttctccttcaagctgggattcagagtccattttcatagggcaaaatgcagagttcgggttccttcctatccatgagartaggtgctgaaggagataaaggaatgaagacatagactttgaaagcaatagtctggcaatcatccaaaggtttgtgggaggacaaaagatcacaaagtatgtgtttgtgaaaataagactatgtcatgaaagctttagaatatccaacacattatagaatattttcacggaaatatttcggatggaattttggctttaattctttctctttttttcctgttcttttccctctccccacaaccacttctstttcattttctgttttgctccttcttttcataagtagctggtagtcagtgttctctttttcttcctgtgagacaggatctccctctgttgcccaggctcgagtacattggtaggatcttggttcactgcagcctgtgcttcccagactcaagtcatcctcccacctcagcctcctgagtaactaggaccacaggcatgggccaccacgctgggttagtttttgtatttttttgtagtaacacggttttttcatgttgcccaggctggtcttgaactcctgtgcttaagcgatccacctgccatggtctcccaaagtgctgggattacaggcgtgagccactgcgcctagcgaggtagtcagtgttctaaacactggtgtacaatccaagtctgtcgctgcccaggatagaggagggatgacgtgaattcacacgggcctctcctacaaatctgagtgtacatcaagtgaggggcgtccctccgcacctcactgttgggctgatcaatcccattcccactccattatgtgtgtatttctaagtggcagatttgccttaggaaatggaagaagggsatgaaatagtgaccaacacaaattactgggttggcgggagttgagagctggcaaaatcgtcttggagaaggaaatggtgcagatttcagagctggcagacagcatctacatccacctctgcaggaagcaagggaaacatttttcttctggagaatcgggcagcctgcagctgatccggtggtgtctgaaaccatcctgtgtgctgtagtgtcaacaacttagcctggttactttgccaccaaaccccaccaaatgcctttgtatctttttcagaactgcatctctgcagcataattgatattacaggaatgaaaagtgttctgaggcatattattcccagggtaaagagtcaccgctgattaattacctcaaggacaaggggacggtgactttttctcttgtatccagcagcgccacgcggggcgggcgggagasgcaaggctaagaggtggatgaaaggctagggttaaggcatttcacaatgtcaggcatcttgttagactgcggctttccaggccttcccccgtgactgctgcgggggcctaggccaaagatatgcccgagtagaaaatctgacaccagcttcccagttttctcttctgctctctttggctgcaasgcttttaccatggsyaaaccattaggccggctctgcagggagggcaagaccacagcagctcagtatttcctgctcagggaaaaaggccaggtcttttgttggtggaaatscacttttccatccactgtcttctaagaatgaaagtaaatctgttgtgctttcctctgccctgtcctcaggcttagccttagtgggcctggtttttgcccccctccagttttagcttcccatctaaaatacaagggaaaagacagcaaggacaggacacttcctcctagtgtcttgtaaagctgcaagggagtcgcggctgagtcgaggatccacattcctggatgagtccttttgttaccagcggagggtgtccgggttcttggcattttgaagaaatagttggacaaaatgcacaaacaaagcaagagaagaatgaagcaacaaaagctgaggtttattgaaagcaaaactacactccatagagtgggaacggcccaagcagccactcaggggccctggatagagaatcttctggagtctaaatactccctagaggtttcccattggccacttggggtacaccccttataaatgaagtggtggcctgcaatcagtcttattggttgcagaaagcaaccratcagaggctgaagtgaagttacaaatatcacactcctatgcaaacatctgattggttttggaaagcaaccaatcagaggctaaagtgaaattacagagttgctcttttatgcaaacgaagactccgcctccagtcagtatgattggttgtgggcagcaacccatcagaggctgaagtgaagttacaaagttacactcctatgcaaacgtctgattggttgcaaaaagcaaaaccactcagaggtactttcaatttcccatctgccctgcagaaaaggtaaggggttgcaaaagagtagcccctcctccttttgttacttaggcgtggaaagttaagggtttcctttcagtttggttctaagaagtcagagtgaaatggctttagattccctgcctgcagattctattccccagcctcactttgagaagcacctggacacttcgctctaggcacgtgtcttcttcaagctgccatccattatgcatagtacaggagctcagaaaagtcacccgtgggttcctttctagctcaatcatgctgagagtccagtccatttataacataattcataaaggaacattctatttagttctcagaactctgtggcaggggactgttgttattcctcctttacagaggtgggtctgaaggtacagagtggataagtcattttctccgggccagccacacagcgaatgaatggagaytccttgtgtgtagtaaatggctgcagccctataagctataatcatatatcatcaacacctttaccctgttattaacgtgtctgaaattagggaacaccacgtacaaaagggatcagggtccacctttctgaagaaaactgcagagcttttgcagttattaaactagcaacagatgtaaagtccaactgttagagtttttctttaaagcagaagttagcarttacaggtgcttgtgatgtcatcacttagatgatcttataaatgccttttttttttttttttttttttttagtcggagtctcactctgtcgccaggctggagtgcactggcatgatctcggctcactgcaacctctgcctcccgggttcaagcaattctcctgcctcagcgtcctgagtagctgggacaagaggagcacaccactgcgcccagctaatttttgtatttttagtagagatggggtttcagcatgttggccaggatggtcttcttctcttgaccttgtgatctgcctgccccagcctcccaaagtgctgggattacaggcatgagccaccggcctggccataaatgtcttttctgggtggggcatggtcactggaaatgtaaaccctcccttccccaggtcagcctgcctcccaggtgttggtgctatgattacagtgaccacataatttatcatccacactggcacctttttgagagaggatggggagcaggtaattatgctgggacaataggcgtatgtcaagatatctggtcaccctatctatgatctgtcacacttagtactttctaaaattctcgggcctttgcaccttctttttatcaacgcttagttctatgttactgaatatttcttaattaagtgcaggaaagaaaataaccaytttttctccttttaaagaagcacacacacctttcttttattggtattacattccttttccctgttggtgcccctgttggttttccaaattgtcttcccatccttgtcctacctcccaatagagtacctcatcctatagtgttattataactacagaaaatatattttcattccttccacttcatgctttcagctagaaatgtgagtctctgagacttgtattcttggggtcacttaaaacataytgcataatgaggccttcaatgactctgatttggaactgaccctctatgaggggttatacccctggacaccaagctgctggcctgagcatgaggttgatggccaatctcaggagaggaggaggaagaggaggaggcggagaagaaaattgcgtgctaatttcagttgtatattgagcccacacatatttacttccaatatgaagcaaatctaagaaaaattctgctttaaagaaagaaatgtaaatcaagtgactgttgatggacgcttggaagaattcttatttatttatttttttggacaggctttcactctgtcagccaggctggagtgcaagtggcccaatcatggcttactgcagactcaacctcctgggtgcaagtaatcctcccacctcagcctcctgtgtagtggagaccataggcatgttccaccacacctagttaattttttattttttgtagaaatggggtctcaccatattgaccaggccggactcaaactccgagatgcacgtgaatctccagctgtggccccttccaaagtgctgggattagatgcatgagccacctggcccagccagaatccttccattaataaaaggatggaccatgaactcccttttatgatatgagccgatcaaatgtgagcagaatagtatcctatttatacaatgtagtttaaaaccaacttcttagaaccatgagctaagggggaatctggatttcaaatgctagttgcatcaaacacgtttccaccccctcaaaacgtggcccaaagtcattagtgtcggagcacccagccatccttggctccttcccacctatgttgattaattaaaggacccaagagctaaaagggagaagtagctgcatgcttgccacttagtaatattttgataagtatttttgggatgaatgcaatgacgcatgaatgaatgaatgaatgaataacataggctacagtattttgtcttcttggttagggaccttgagtaaactgaggagtctgaggggaatgccatggaagtctgtaaacccaaaatcctcagcgaaacctcagccatctagggacatctggggcagcagagagccactggtgtggtgagttatctccctgggccttgagatagccatgctgttttgtctccacaaggaagaagtaggaggcatagcccaaggcagcttgagaggaaagcctcttggccttgaataagatgactttgttactgggcaaagaaagcccggctggaagtgctctttgatatgcaaatatagcctgataaggatttcctctccttcctactttccctccccaaccctcccccaagctaaaattctcttcccaggagccctgtcatcagcagggagttttctgtctttgtccccatctcttcacttgtgctgtgcaaaatcaggccacgattgcagggtagtccacggcttccaaagagaactgcataaatatacatctttcaggggaagagggagaacctggagaagtcaggagagcaaaaccatgccagtcagcttcagtgatgataaaggttactgttggatgaaagtttgcattttgttgtggtgtgggaaggaccttatcctgtcagctctatggatgtgcccagtttaagctctgaaagttcctttaacttgaaattgtttttgatcatgtgacaaggtcttctgaccctttatcacccacagtgttttattcatttgctctaaaccagcagtaggtgaagttaggaataatatgtcaagcttcctaactccatggtgctctcattgttgtgtgtgtgtgtctgtgaataaacacggaaataattacgcaaataagctattggcaggtggtgataacgtaaccgcccaatgggttcattctgcctgatgcccagataaagccgatttatctagacaggggaattgcaatagggaaagagtttaatgttggtagagccagctaaacgggagactggagctttattgttactcaaatcagctttcctgaaaattcagagactggggtttttttaaggatagttttgtggacaagagaatgggtactgctgatgggctgtggatgcaatcataggggtgtgtaaaacccttgtgccctgaatccgcttctgggtggggggcagggcacaggaccagttgaatggggatggggctaccagtcctcaaaaatgcaaaagccggaaaagacatttcagaaggccaaccttaggttctacaaagtgatgttatctgcaggaataattggggaaattgcaaatcttgtaacctctggaataatggctgctaatcgtttatgtccactctttagcagaattcaggctcctgtcctcctcctaacttggtggtcttttgctagctttacaaaggcagtttagtttgggggtagggccattatcatttaaattaagtactaaatatccccccaaagttagcttggcccaagcccaggaatgactaagggcggtctgaaggttaaaggcaagatggggctaggttagatcagatctctttcacggtcataattttcttactcttacaatttttgcaaaggcagttttaataactgctatttagcaaagacagttgggtaagttactagagggagtattaccttagatggggccaggagggtttctctgaggagatcccatttcaacagatctagaaatgtaatggagccagtcctagggaaacaggactaccaggaatcctcaccagcccsgcaaagacgagggagcagcaagttccaaagcccrtggcatgtcaagggtcgatgaattcaccaactgcaaggggctttggtgaccccagtgaacagatgagaaaggggaggaggctgggatcagtgcacagctttgcaggctttgggaaggaatttcgagtttatctcatttgtccaggtatttggatgaagccctggcatactaaccctatgaaagtttatagttcccaaattgcaggataacaaggctctgtaatcttcatttcctcaaagttttacaccaggattctatggccaagtgtgtggcagtgtcacaacttaagagccagtgtaattgcccaacgggttctccttgcccgctgcctaagcaaagccgatttatcaagacagggggattgccataaagaaagagtttaggtccaggcacggtggctcatgcctgtaatcccagcattttgggaggccaaggagggtggttcaactgaggtcaggagtttgagaccatcctggccaaggtggtgaaaccccatccctactaaagatactaatattagccaggcgtagtggtaggcgcctgtaatcctagctagtcgggaggcagaggcaggagaactgcttgaacctgggaggcagaggctgcagtgagtcgagatcacaccactgcactccagcctgggcgacagagtgaaactctgtctcggaaaaaaaaaaaaagagtttaattcatgcagagctggctgtgtgggagaccagagttttattattactcaaataagtctcccccaaaactcagggatagagatttttaaggagaatttagtgagaagggggtcagggaatggggagtattgattggtcaggtttragatggaatcagggagttgaagctggcctcttgcactgagtcagttcctgggtgggagccacaagaccatatgagtcaatttattgacctgggtggtgccagctgatccatcaattgcagggtctgcaaagtatctaaagtactgatgttcggttttaccatagtgacattatcccctggagcaatttggggaggttcagaatcttgcrgcctccggcagcatgactcctaaaccctaatttctaatcttgtggctaatttgttagtcctgcaaaggcagtctagtccccaggcaggaaggttgtttattttgggaaagggctgttatcatcttttgtttcaaagttaaaccgtaaactaagttcctctcaaagttagttagtcctacaaccaaatcaactttgaacaagacagcctggaggttagaagcaagatagagtcagttacatcagatctccatcaccttcataattttctccgttataatttttgcaaaggctgttttaataacagccagtcgttcatgtttccttgtgccacgtgattattttgtacagtcaacattaagagacaggcacttgtaaatgttgagatgccaagggggaaagaattttagaatccagatccgctttggtaagagtggccttcgagcctcatgtattctctgttcagctgttaagattgttattaaactttatggaccataaaccccacagaaacaaggaggttgaacaaccatgctattacacaagtgtcaaaacaggagctgtatttcatgtcctgaaaagtgtgcacggttggcctcctctaggtcccacgtgccttctggatggttttaaccctcagcctctytttggcctgtgagtgaaacccatcatttgacacagaggctttctggaaatgatgctcctcttagatgaaagttccctttcagaaatctttcattccctgacctctgtgtccatcccactaatatatttcttaccaggagtacatagtttgttctttaagcaaaaccatatgcatcgtattttaaatggaacagggaggttgttccatgcrtcaacttagtccaaawgtagagggtcaggaaaacaatgatatgagaraagggccggttactgtctgggaatccataaatactgcttggcaaatggcacattgcatgcttattccttaggcatccgtttagcaaaataagatgtcaagctaattgtaatgatatttctggggtttcatcttctctccctggtacataaaagaatgcaattccacctatattttgatttaagatcaaatttttgcaaagtataattacatttgatgtaattgcccatgcaacccagatgtcatatatttatgttattattatcatttttcatgtgtagatgtggtgatcgtttgtgctttgttaaatattcctcgtctgtccttctggggatgatgctttttctccctttttggtcaggcatagataggtgacttgctttagccaaagaagcatgaactgtcacttcaagggggagatttacaagccagtgcaggtggattccctgctttctcctgacatcatgatcatggactcacatgacaaaatggatcctccatcttccagcatctctgattgagactaacaagggccctgacagccttttctggacttgtagtatgtgcaagaattaagctttttctgtatcaagtcaccgtgttatgggggttgttcctcactgcagsagaaccttgttcatccgtattagaacagtgtggtgtttcatgttagcagagtgtatcaggatcttttgtttttttttttttttaaattaaggatgctgtatgagtcttttctcatactactgagaaagacatacccaagactgagtaatttataaaggaaagaggtttaatggactcacaattccacatggcggtggaggtgtcaccattatggcagaaggcaaacaaggagcaaagtcacatcttacatggtggcaggcaagagaacttgtgcaggggaactcccctttataaaaccatcagatctcgtgggacttactcactatcacagaaacaacatggcaaagacccatccccatgattcagttacctctcaccgggtccctcccatgacgtgggaattatgggagctataattcaagatgagatttgggtggggacacagccaaaccatatcagatgcaaagttatgcatatgttgatcagctcaatttagcctttccatcatgtttacatatttcaaaataatgtgttgtgcacaatatatatgtgcaatttttgtcaattaaaaataaattaaaaaaattaaaaaatggctttcccacagcctgtcgacttccatccccatgtgtggctctccccagggcctcccttcttgttctccccagttgcagacctcagacaggagtctgcttgtcttcctaggcccttgtcagagtggaaggtggcyctccaccacaccagcccactttccagttatcaaaaaggatctttgatttaatatttccagagcaattttggtgatttccattcaaatctgttttttgtcataactaccttgcttgcctatgggacatgttcccatttcagtgcatacttgacctttaccataaatcacatatttgtaaactgtaccctcctgctgttttaytrggcatggagaagcagtcttttctttttcttgatggcctgggttgaccagatcctgacttttgtggagacattaaagtgctagaaatgataatggtgaaagattcagaagttgaaggagatataaggagagaaatggacaattcttttggtaattgaatgaaataagactcttaggaaaattctccccagtggcaatgttgtaagaaacaccaggccgggcacagtggctcacacctgtaatcccarcactttgggaagctgagacaggcagatcacttgaagtcaggagtttgagaccagcctggccaacatggttaaaccccatctctactraaagtacaaaaattagccagacgtgatggtgcgtacctgtaatctcagctactcaggaggctgaggcaggagaatcacttgaacccgggaagcggaggttgcagggagctgagatcacgctgatgcattccagcstgggtgacagagcaggactccatctcaaaaagaaaaactcaacgaaacaccccagcttctatcattctcaagcttagtgtgtgcaagactcatggatgctgcttgttataaaggaagataaattatgaacaggcagactggtctgtgaaccttacccagaaaaatacacagtagtccagtatattggcctccagggcaaagctacctaggttctgagtccaattatggccttcatgagtcttgtttctttggacaggttttccagtgtctntgcgcctcaacttcctcatgtataaagtggagatgatgccattacaggttgctgctttatggcacataattaatactagctcttatttataggaactgaacaaagccccagttgttttgaagcatgtcctatcattaacacaggtaatcaggatatattcattgaagtctcactgtgtgccaggcactatgctatgcaccttaygtgtgttattttatttcatccttccagctctgggaggtgatgactgtcatctgcattttgcacatgacaaatctgagggtcagagaacttgcccagggtcacacaattagtagatggcagctcaaggggtttttgcctgcgtcttcacccaaagccactaacacgggatctgtcaattgcattgctggtgatcaagaaatgccagctcctccrctcttccctgagtgccttgttggagacaaaaccagcaggattatatccccagcactgtaatttagtgtggcagtcaggggaaaacaccttgtagaatttcatttcttatcatttaatgtcccctttaattctcatttaagttcccctctgtaaaaggcagtcccttcagctctcataaaactttatggtctttacttgtgattaggcaatggtaaaattgattctctaaaaccaacttctagtcaagttatgtaattagccaataagggaggctgagagaggaagatatacaaggttctccctcaagaggtcagacgtattatcattggttagatgccgtatctttaaaacaccatcagcttggaaaacactatccattagcaagagatcagagcaagagaaacctcgaagggtcgaacggtccrttctgagggctccacaaagaactcggcatcccagaaggatgattagccttccatctctcgagttgtctcagagcacaacaggtctgagtgtttttttctttaatgaattaaccctttggatttcagccctagcttttgcttcccacatctgacatcctgccctacctcctgccagaaaagattttgatttcgatcatggcagttgctgtcgctgaggtaatatgaggagatccgagacctcatccttgcagggagtgggcttgagataattctcgttacaagtttgcctagtgcttcacataagcagaggccccaagacatcagcaagcccgttttttgcctcttcctggttcatggttagactgcatttttgagcctctgcctgttaggtgcagccatgtgcctgagtcttggccaatggactgttggaagacgagacgttggccccttctcaacctgacctgtaaaaacctgtcttgcaaaaccctcacggctctttcccctgcagtcttgatgtgaacaagcatgatgatgttggaagccatacgcaagctggatagagccagggtccctgagttcaccacccagagcaaagtcacttgtcgatcagaaatacagaactagttttggacttgatgtgagaaatcttttactgtatcatagtagcaagcattaccccaaccaatacctgtgctcatactgctacagttttttttttttctttttagtgactgggtcttgctatgttgcccagacttgggtgcaatggtgccatcatagctcactgcagcctccaactcctaggctgaagccatcctcccaccgtagcctcctgaatagctgggactaaagtgtgcaccacaatgcccagctaasttttgtattttttgtagatacggggtcttgctatgttgtccaggctggtctcaaagtcctggcctcaagtgatcctcctgccttggcctcccaaagtgcttggattatagacatgatccactgcacgtggcccatactgctattccagacaagaaattgtaccaggaaattcactgatattattggtccatctgaggatcatcagagatgaaaatgagatttgacaactgcatttggaaatggagtatgacagtatcattctgatgtagggaggatatcacctcacaggagtctttcctggctatcctgtccaaagtcactactcacaatttctctatcccataactctatyttatttctctgtctagcacttatcactatctgatattttctgtctatccatccgtctattcattcattcattgctaatttattagtattgccttcccatgaactattagctgccagagagcagggacctcatctgtcctgtccactcatgtcttcagcacttagaacagtacctggcatataggatgagcttcagaaatatttgccggtgagtgaatgagggagtgaatgaatgagggatttgcagcttgaacgctgtactttgaaacagttccagattcatgaaatttctttttaatgcagaagatttcttatgtgattaactgaatgggaattgatgctttgtggaatgaaatggattgagtacagagtgtgggatcaagaacttttaggcactgtgagtataagagggaaaccaggccgggagcagcggctcacacctgtaatcccagcactttgggaggcggaggcgggcagatcacgaggtcaggagatccagactatcctggctaacacggtgaaaccccgtctctactaaaaatacaaaaaattaactgggcatgctggcaggcgcctgtagtcccagctactctggaggctgaggcaggagaatggcgtgaacccaggaggcggagcttgcagtgagccaggatcgcgccactgcactcccgcccgggtgacagagcgagactccgcctcagaaaaaaaaaaaaaaaaaaaaaaaggaaccagatggccctgcccttgagcaggctgtggtctggcctggtggagagacagagaatcagttaattccagggtcatgtattaggtagtaagatagtggttcacaccaaaaacatagaaaatgatcacttagcctgatccagaagttcaggaaagggctctgagcaggagatggaagacctcttggctggttaaatggagatcaagtggcagcttggactcctgctgcaattaaaaaattactctccagttttcttcatgtgcctccccattcactccaccaccactcaccccaaatcagatcatgattcatttgggttgtaccgattaagagggttccctttacatgaccattccagtcatgaaacagagaatctggtcacctgtcctttatcttggctggtccaattccataagaagtaaatgctgtgtgtctgcaattcaaaagacccctttcacgggaggctgggagatttttcyatctaaatagcttaattgttactctacagggcaatcataaatgtaaatcgacttaatatgacttgattgttagtaatgactgtgcctctaatgacgctggccaatgagcctacacagaatgtcgcatgcagatcaatgagccaaatgttagcaggggactgggcatttgaagatttaaaaaaatgaaaaattgcactgtgacattgctggttcctattagcaaaataacagacagtgttatcagtcattgactcagaagatagtttcttaccgtttggggaaagtgcttgtctattcctctccaaagccatttwaaaaaaaaaattgcaccrgttctcatcccatcatctgccttgatcaaacatttgcttattggaatcacttcgaaaaggaacttggtatcgttcacatgtgtttataactctcaaatcttcttcttccaatttttaatcttsatcaccacagctttataacaggaagaacgctcaaagaagaaaaatagaagaagcctgaattttaatttgctatttcttcacacacaaaacaccccaagctcaatcaatgcccagaaatgaaggccaatagatgatagtggggcctcagatttcccacctattgttttgaactctaattagggaaagggaatttggaaccattgtcttctctgagtgtgcagacacgatgttatcattgtgtttacagaggtggtcagattcccakcacagtgtactcccgcacagataaccgtcccatcttgataaaacaatgctctcagccgaatcctaaacacgctgcacaaggaagaccttatgctgacagtagggaggaagcgacatgttaacaaacaagtttgccggccaggaagttttaatcagccctttctactgcagggggtatgatggatggagaccctgtttcagaggggtttcctttagataaaacaataataccatgctttcaagaagctcgttcgacagctgtaaagctatgattaatcccccaaaagtcaaacatgggaagactggcaagatgagattattcactgggtataattagccacaattatcgctaaagagaatttggggagattctgctctaaagggaaaagctttgtaaaggagaattaccagtagagtgaccttataatttaccatccaatggattttgaatacttytgagagagaaatgagatactgataataattataccaagacaacagacataaattgggattggcctagacgagcaaagatgaatggtcattctgtctgttagtaaaattccatcccaggcacaatatctcagacttgaaacaaaataaaagtgattctttctaggataaactctaaactaagtgtctgataaattctgggaaagtttatccaattgttacaacccagggtcaggaaaactgttttcaattttctgctgtatgaagttgccagtgttaaaccctttygatagcaagtagaagaaatgttcattcaaacaggcttaattaactgaaagatataggtgtggtaaggggatcaggtaaagcttgacccaggggctaaactttaaggacctggttcccctcttttcatcccttggttttatttttctcagcattggcaccattttgtgacaagctcactccttgggtcttatgacaaatgttgactcttctaaaccacatctttccagattcaatatagtaggagaagaccagacttgctcttttcctggaatttagtctgacgtggctgggacaacatgcccactctcaacyaatttttgtagccatggagatttggaagtctggcaagtcttgggtcacatgatctaccttacagctgttactrcagacctcccaaagctcacgaactgagagtcaggaggcgtggttcccctaactcaaatcagaatttcgttatcaaaagaagagagggatggttctgtggtgtcccacactcaaataaacatcctttaaatacctctagatgcttataattcctgttgcagccttagtcagtgggagccactgasctgcattcgtgtaggaactgagcaaggttcatctagtctcggtagctasctaccccgagagctggctgatttttttttycttaaatttaattcaagacttcatgaagtcaacaaaatggtctgttggaaattattcctaacccccaaccactgtcactgccacaatcaaacatattttcattcttttgcagctgcagcccttctacttgaactttcccactcattgcccttataacttgccatttaatatctcttgctttcctacatggctgtgactactcgtgggcagggactgtatctcctgtttttggtagtgcctccagaaccaaacaccatatgtcataaggtctattaataaatatctgctagtttttaaagtttgagaaaaacccgtattgtggaatgaaaatgatactgacaagggaatacatctagatcagaaatactgatatcstaagtgagatcttgttttttaaaacaaaaaaaagtttaagaaattgtcatataggctgggcgtggtggctcacacacataatcttagcactttgggaagttgagkcaggagggccacttgaggccaggagtttgaaaccagactgggcaacacagtgagaccccacctctacaaaatattttaaaattagccaggcgtggtggtgcatgcttgtagtcccagctactcaggaggctgaggtgggaggataggaggctgaggtgggaggatcacttgagcccaggaggttgaggctgcagtgagctgtgattgcaccagcctgggtgacaaagtgagaccttgtctcaaagataaaagaaagaaagaaagccctatcaaaattttaaaaaataaaacataagaaaaaaataaatggatacatgatatttgtacttctaagaggcatcttctatacatttcctgtttctctcttccttttcctaaggagtccttgttgatttgtggccatgaaacctctctcctttccaggctggcttcttacctaggtcgtgtcctatccctttattttctggcagggctggactgtcacttggttgttctcggtttcaggacccacgtcttttgtctctgtaatgaatgtgttcagaggtctctgcacagagaagctggctgttaggaaaactatttcttctttccgagacaggctgcaaaatgcttgttactattttgtgtattcctggcaggatttgtattcttagttttattactaatgataataacagttaatgttgaaatcagcttcatcctgaaagcactgcatccattatcttattctagtctcaggccctggaggaattttctctcactatacccatttcagaaattccagaattaatgctcggaggagtcaagttacttgtctaagctctatattacagaacttaaattggcttctctctttcctttgcggggtctcacatgatccgtcgttccaaatatgagcactttctcttgtcttttctgagctacctattccaagaacacagaggagttgttattgtggttacttgtggtaagaagastaccttyctgattggacccagggcagaaaaaagaactttcaggtggaaatacagtcgtggtgtcaggtagtgtgtaacttcgttaagttcagtcatagcagccgctgccaaggggggctgttcctgttcctcatttccaattgaaattaataactcacttgagatcctactaaacaacacacggaacaatgaccgcaataaccaacatactttgagtaactattacatgcatgggctctgtgctattctcttatgtgtattcatttatttaattcccttaacagttctttctggcagagacacccccccactcttagcccacttttatagatggctaagcagaggctcagagaagtcagacaactcacccaggatcaagcagagggcaagtggtagattctagaatttgcatccaggcagttgagtctagaattgtctttgtgtattttgctccatggtctagcacaggatcmccattggtagatcatcacttagaatgccatcactaccttctaacagcaatcagtccccttaagtggctttcttctcttttttttcttttatctttktgttttttttttttttttgagggagtcttgctctgtctgccagatggagcacaatggcgcgatctcagctcactacaacctccgcctcccgggatcaagcgattctcctgcctcatgctcccgaatagctgggattacaggcacacaccaccacacctggctaatttttgtatttttaggagagaggkgttttaccatattggcccagctggtctcgaactcgtgacctcatgatccactcgccttggcctcccagagtgctgggattacaggcatgagccactgcacctgactaagtggctttattttcttatgtggggatcctggagacacagtgtgtgccaaagcgtctgcagaccagtctgtacagttgattatagatatattaatgaccacttctgagctaaaaaatgatctagaataatagactaccaaacacataagcttatttacggtttgcctccttctcatgcttttggaagggaagcactgagggtcattgtatcagtcagcgtagactaggtttgccgcagtaacaaacgaccccaccatgccatagcttgcaaaaacaaagactgagttcttgtctacactgtagkgccgtcaagagctggctctgcttgctcttggtcttctccatgccaggatccagagtaaaagcacagcttctctctaggactccaggggaaagagaaaagacaagttcttaaagtttcttccaggacgtgacacctgacatttcactggccaaacacagtgacctggtcactctggggcagggatgtgtaatctccccatagctggagaagtaaataataatgcacaataacattgtctcccatgggtgcagatgtgatgctttcctccttgtgactgttttctgtcttgctgtcccaagtcctaaggtcccagccacctatggttctttggacctgtgattttcgctgaccccgaatgactggaggaactgctgcctgcatccccaacccagccctccttrtcagtcacgtagaaagcagttattgtttccaagttccctgcccttgttaaatgtcagctttgagtgaaaatgttcctaattttactcagagtgcaaagaacayccaggtcaggtacctgacctgcttgattcatgtcttggaaacactcctttgtctttcagagaaagtaaagagtgatggagacagagagagaaagtgtgacctactttttattatcagcaccatttcatctgcaaaacacgacttttctcttcttrttacgctgagcatgaaaataaaatgttttccaaaagacctggctttggctgttgtgaggaaggccagggacttgttcaaaactctgatgagctcgatgagcaaatgattccaatttttaaaaactgtaattgactttcaaactgctctcactgtccacacataatatgtggtacttttctgcaaataccagcagcaaggtaggacaaaaccagctcccacactggctgtttgcttgatattaagctttgccagtccaatataggtcacatttccaaccagattttgtgcttatctctacattacaccttgtagcaagggggaaaaaaagagcttcttgacatctttttgaagaatggcgctctttaaaaaaacataagggaactttttttttcaaacactgtaaygagggtattcaagtctgcaggcaaaacagagctgtttgaaaagacattagcctcgaaaccgcactgtgccagaatagatacagctacgtcaaaatgccgcatttattttgccattacttttcactgactaaaaccatttgctaatgaaagttctagctgccataatttcagcacctgctgatggaaaggtggactcactggtcatggggagtacagtaaaattaggagagtagatagaatcctgaagcatttgagctgcaaaatcatagtaacaacagctcttaatatcctataattgaaaaagagattgccattttcaaagacctttcacagtcattctcttaatcaagtctcataataaagatgtcattgggactkagcagcttactcacattctcatttcactgatgaggaaactggagctcagggaggttacatggattctggatgacctacaggtcatggaggtaagagaggaatgggttcctggcaactccttctgagtactaactgttaaagtaagcagagtgtgtgtctaaacttctcatgggctactgtgaggagtaaggggtaactgcaagttagaaggcatgatgcccaagattgtccttactctgacacccactgcaagtttgaggtggtcctcaaacccatcctcatggctgatatttgctagaaggacttgtggcacttagcagaagctrttgtatttacagttacagtttattacagggaaaggatacaggttaaaattagatcggggaagagacaaatggggcaaagtccaagacaagtaccagatgtgaagcttctattgtcctctacccatgacatcaggacagaatacttttctactatctatgtgtggcagtatgcatggaatattgtcagacagagaaactcacctgagcctctgtgttcagagtatttattgggtcttcgttgcgtaggtgtgattgggtgattgcccacatatttgatctcagcctccaagtcaactgataactgtggtacagtgtccctaccctaagcaatattgttggtcctttaagaatggttcatctgcaacctaaggttacatgggtgtagttaggccccaccctaaatcacattaagagtctccagagtatgatcagaggtgcccaagcaaacaaagactctttttttcaggaatatattctgcatatatttcagtgatttttttttttttttgagacagtctctcattctgtcgctcaggctggagtgcagtggcrtgaccttggctcactgcaatttctacctcccgggttcaagcrattctcgtgcctcagcctcctgagtcactgggattacaggcatgcacaacaacacccagctaatttttgtatttttagtagagacagggtttcaccatgttgcccaggctgctctcgagctcctgaccttaggtgatcccctcaccttggcctcccaaagtgctgggattacaggcgtgagccacgaccaccagcctcagtgaatgttttttaatttggaaaggattttmtaagaaaggattccaactttcccatttacagagaaggaagctgaggctcacaggtttcactcaaaccataaagctcaggagtaactaaaggaactggagcttgggggtcccagtcctgggcaccattgctaagtaatgtggcctattttcaataagggcttattaatcatactaaaaataagaacttaaaactaaatttttatttgcctagaaatctaacatctttagataaaaatattccatattcaggaggcataattctttctcttttctttttttcttttttttttttttgagacagagttttgctcttattgcccaggctggagtgcaatggcgcaatgttggtccacctcaacctctgcctcttgggttcaagtgattctcctgcctcagccttgcgagtagctgggattgcagggatgtgccaccatgccaggctaattttgtatttttagtagagacggggtttctccatgttggtcaggctggtctcaaactgccaacctcaggtgatctgcgtaactcggcctcccaaagcactgggattacaggcttgagccactgtgcccggccatctttctttttcttcctctccttctaccttgcccaccatggcttaatttcaccagaatatcatcattatcaacatcattatttctagttcagatcattctaaaaatagagcagtcattttcttctatataagtcccaggtccagcctgctattttttgagcctacctttcctaatatctagtttatattttgttttgttctttcttgggattgggagtcagaatatcaactttttcagaaaagagctttggaaattctacatacataatatatataaattttccattcatagtgtgttagcagctttttctacaaatctcttggcgggtggggggatatttcactcttctatgaatcaaataatatatggctttttcctattggaaaaaattagtcgtgtgaactttattcttcaagaaaaagtagtttttatctgccttggaaatgtcaaaaggattcacragtttcacaagtgatgatctgggttgattgctaggaactgtttttagttagtttttttttttttttttttttttcagacggagtcttgctctgttgcccaggctggagtgcagtggcgcgatctcggttcactgcaacctccgcctcctgggttcatgccattctcctgcctcagcctcccgagcagctgggagtacaggtgcccgccaccacgcctggctaattttttgttttattttgttttgttttttttagtagagacggggtttcaccgtgttagccaaggatggttttgatatcctgatttcgtgattccacccaccttggcctcccaaagtgctgggattacagacatgagccgctgtgcccggctgctaggaactattaatccatagacaaggctctggttagagaagcagaaagaaggctgggtagaccggggaaggtagctgggaggtctctgaagcttggtcttgaagctgtgaattcatagacgtcttggaaaagaactttataatgtggttagacaagttttataagattttaggattaggaaggcttttttagggggtggggttgcttttaaactttgtttgaaaaatggagcttgctgccatcatatcatcatcaaaaatggaacttgtctatccacaaatatttatttaaaagtcagactaatggcagaatggaaagaatcccagctttggagttaaaatatctcacttaaaacttgtcttcgctgcaggctacttggttgtacttgagtaatttactcaagattctcttcagcccagtttccttatctgtaaaatccttccactgttgttaggaggatargaaagccagtattggtaaaaacatatatcagagtccttttgactgtttagaaagtgttaatttactccacgattatccattcaacatttattagttggcttctgtgtgggwgagtaaccattaataccttgamtaagtttataatctggtcattctgtagagcttcctatatgatgtcttctgtttaagtatttctgtaataccttatagacatctcttttagactactagtgattgttggtgtcaacatatgtgtgaaaatgcatatatcctttattaggctctagcacacagtgtgctctcaatgtttgtcttttcaaataaacatacttggccaggcctggaggttcatgcttgtaattccagcactttggggggccaaggcgggaggatcagttgagctcaggcgttcaagaccagcctgggcaacatggcaaaaccctgtctctacaaaaaataaaaaagttagccaggcatggtggtgtgtgcctgtagtcccagttactggggaggctgagatgggatgattggttgagcctgggaggtcgaggctgcagtgagcaatgatattgccactgcactccagactgcatgagaacgtaaaaccctgacttaaaacaaaaacaaaaagaaaacgtgctcattggctaagcctggtagaagccacatgaccaaggctgatcattgctgccactgggtggcagcatactgggattgaggaaaataacccctcaactgcccggatgataaacacagagttctaaaatggcaacaaagggagatccacccttctcagttattgtttgaaaggacagctctcaggcaaaatatgtccacgaagttccatggaataattaccttccttggtgttaaaaaatgccctcacatttcaaacatgtcctgctttaagttcccagcgtcttaaccaggaactcgcttatgtgtgttgttttctgcttctttccactagggagctattgctgtaaaacagaaggggtagtattacagggaggagatgcacattttaaaatatatttctgcttcgtcaaactgtacagaactcttttcctcaatgagaaccaggtttttgcatgtatcttttgccaagatttgagaagggaagtctccaccttccagagctttggtcatattttgtttctctctaagggtgaagatgctgtttgttcttgcagggtgaggctttggccaataagaaagcagtgctcagaggtaaagagcctcgctgaagccctagttctagcctaccaggatttggtcatttcttggtttttcatttgatcccacccttgcctmccttcagaatgaaggtagaatgtgggactgtttcagaccatgaatgcgattgggcagaaagactgtgaaccaagagggcagggagaagggaagggatgtggggagagctaagtgtaaattgtagagtctatgaacaattctggagacagacaggacaggtaaggagaaactgctgctcttggtagaggtttacagccaattgtagaaccctaagaaaatacagcactttgggagtggatggacccaaaatgggtggatcatttgagcccaggagtttgagaccagcctgggtaacatggcaaaaccttacctctcaaaaatttacaagcttagccaggcatggtggtgcccacttgtggtttyagctacctgggaggctaaagtgggaggatatcctgagcccaggaggtggagattgcagtgagccatgctcgtgccattgcatttcagcgtgggtgacagtgagaccctatctcaaaaaaaaaaaaaaaagttcctaagaaaataaagcctggcccatgcaatttgaaygtaactgtctataatttctcttggttactgaaattctgagtttgtgtctatggtttctccatccttgtctttgaggaggagcaggatggcgaagtcgcagccatttaaaaacttgttttcagtcattttgcagaaagcagacgtacacttctttgctgttggtctgtgatgcgggagtggtttgtcagttctttcattcaacaagtgctgatctttgggcagcatacactggtatgacctttatcatttgttcaggtgttgtggagaaagttgtttgcttttgaaagacttgatggagaaaagtctttctacatttctagaaagaccatgggtgtgagtattgagagctgagtgccagtttgtttttttgtttttgttttcgttttttgagaaggggtctcactctgtcacccaggctggagtacattggtgcgatgaaggcttactgcagcctctacttcctgggctcaagtgatcctcccacctcagcttcctaagtagctgggagcacaggcaccagcaatgacacctgcctaattttgtattktctgtagagatggggttttggcatgtttcccaggctggttttaaactcttgagctcaagccatccacccgccttggcctcccaaattgctggaattataggcatgagccaccatgccctgcccaggcaccattcttgactgcgagaaagtcactgtgatggtttctccagcctgagttttctcctgtatraaatggaccttgttttgaggagagaatgaggtatgtggtactcgtgagcaggattttcaatgcctggctggttgttacttatccatttagtccgagcttcagggaaagaacatgacaccggcstccagcagagcctgctcttggtcyactgtttatcctggtgaccttaggcaagtcatttaatttccttgagttttggtgtaagtattgatggagcagaccatcaataactgttcttatgtctrttattaccatgtgtctgtctacatgtttgtttgtaaattctctgtgggtaaaagttctcttttcatccccttgcctcagcacggagcccagagccagactgcaggtaggcactcaatagatatttgataaatggatgttagtcatttgatttctgaagttgcgtaggtaccagcactacaaccctatgtagttcacataactatttgcagttgtattttcctttaaatctaaattggagagaaggaaggtaattaaggcataattatcagacttaatcaagcacttatttattgagcttacttggtgcctgggcttgtatcttttgtttctgatttttagtttcgtttcattgctccagcgtgggggaatttgcctgtgtatccttgaataaatgtctttctttggaaggcagattaagtagggatttctcttactgtttatttttgtttctaactgaagttcaatgaattattcttttacccagacacttacatattcctagccattccttttgcttaagtttgcagagatttgtgcttaaaactgaataaacaatctcagggtttgtgtgtgtgtgtggatgtgtgtgtgcgtgttatatgaagtcttgctagaatgcataaacaaacaaaaaaaatatcatactctcagatcctggatactgtggtcrcctggacttcaaaagccttttgyccgtatgtatttacataatgtattctccatgtttggttttcattaaacccatgagtttaataataaagtgtttggaactatgcttttccctaccacttttctttttttttttttttttgagacggagtctcgctctgtcgcccaggctggagtgcagtggcgcgatctcggctcactgcaagctccgcctcccgggttcacgccattctcctgcctcagcctcccgagtagctgggactacaggcgcccgctaccacgcccggctaattttttgtatttttagtagagacggggtttcaccgtgttagccaggatggtctcgatctcctgacctcgtgatctgcccgcctcggcctcccaaagtgctgggattacaggcgtgagccaccgcgcccggccccacttttcttgttgtgaatattttttccccttctgaagtgaatactgatttttcgttacagatatttgatgctttgggggcctgttaaaatagttgtaaatacactttctaaatagatgaaatgtaagaaattctgagaaggggtttctttgacttactggaaaaaaaaataataggaaagaaaatgtgatcagttggtatatttggctctctttcatcaacacttttatggacctgcattgcagtgtttctgtgatgtgtataaaacacagtttcagtgatcgtgcaagcctcagttttagaagataaaaagatatgaacttgaacccaagcttctctgtcaagagaattataatgtgttttgactgtaggcttccttcgagttaaatttacagtattttcccctaacaataacaacaaccagaagtgcccctttaagttgagatgcttgttaaactttacatgtatgcatgcatataaatgtacatttctgtatatataatatacgttcacatatagttacattagatttttaaagaatttcctttttgccttcaaatcattgcacagaacatccaagtagacatcatgtcaaaataatcaaaatgtatttaacgctctctcaagaaatccatttaagaataagaacacggtttgggggtgattttcagaccgtaaattgaagtgtaaatattcgaattatyttcataaactcttcagttctgttgggcttttatgttatcatacagtgatttttttttttgtatttaagttttctagcagttctcttttttaagagcctcaagtgtccaataaaaagcaaatacttgaattttcagtttctatatagtgcatattttttctcctgcttgccttatttttataacagtgatttataaagacattactaaagaataggaaagaaggattttgaagaggaactgctatataacactgcttaaaaatctatttccaatgctaaggagaggaaaaaaaaatactggcaccgtatccgagtgggatctgggatccgagtgagatggccataccttcagtcattctcctccccaaatatttattgagcctggtggacaaggagggcgggataagattgccaggccctgcttctatttctggggttgggatggcgactaaagacccgcgtggactgcatgctgcagccagctcaggaaagatttcaggaagagcgtttaggaaggcagctttgaaaagaaaatggaaagatgaggttgcagagggtcagtccawggtgaccagaatctgacctggggcaatgccataaatccaagaaagactgggtttcaggtgcaggaaatgcgattgtgcacggacccttgcctttttaccmagtatctagcccatccttctttcttagaagcagaattttctaagaggtacacggtagttcaggataaaaattccctgtgctaactgcccttgcagctagctctctgtgaccgtgtgaccatgtgacccagttctagcgaatggggtggcagggaagtcccacatggacttcttgggcgtgtccttaggggaagcatagcttcttgccttcttcacactcctccttcccttcctgccgtctgggatgtggggtctggcagagaaacaatattgtgaatggaaatgggaggaacttgggtcctgaaaattacaccataccccagagcctggggtggattatttcaggacctttcttccttccttccttccttccttccttccttccttccttccttccttccttccttcctttctctctttctttttttattttttttttcagacagggtctcctccacacccagactggagtgcagtggcacattcatggctcactgcagcctcaacctcctgggctcaggcgatcctcacaccttagcctcctgagtagctgggactacaggtgtgcaccaccacacccagctagctaatttttttttttttttttttttctgtagagacggggtttcaccatgttgcccaggctggtcttgaactcctagcctcaagtgatccgccagcctcagcctcccaaagtgctgggatcacaggcataggctgctgcaccaggcaaggactttttttttttttttttaaacaaacttcactcagtttgaaggcaccattatttgggtttcctgttaattgcagttaatcctattgagtaaatgtatcaaggacaaagagcagaatgaaaaaatgagtgagtaaagttgagcagaagaactcactgaaaagtcctggcaaggttccacggcacctgtgatgcttccatcacacatatttgctgagtacccgctgttcataggtcagtcrctatgcaaggcactgaggtgacaaagacaagsagaatgacagttaaatgtaacatgggctttgtggtcaattagttctgggttcgttcccaggtcctatcactaactagtacccttatgaacctggacatgtcactagcagcctcagtttcctcatccataagatggggatagcaatatctatctcctacacctgatgtgagtatcacatgagaaatgcacatgaaatgttttacttagtgatgagcatatggtaaataagaatttaatagattttagtgaaagcaaaataaaaggtcctatcattgtccttaaggagcttacgaaaacagagctatacgcacatccgtagacagttaccacactcaggaatagtggaaaactgacaagaccctggagatgctgtgtggggagggataatgggaacgcaggtcagcatgctctaggaatggtaagagaractcccaatctgaacggtagtcaaagaaggtcttcttctctttggagactgaaaggctgagagggtacctgccctgctaaggaaatgaacaggacggaagaatgatggagggagaatgggaagtcctcagcacataaaagtttgagctggaaatgaaatatacaactctgcatagtcagcrgattttgctgggctgggccagttcagctcagcaaggattgctgggcatgtgcttgaaggagaaaggtgaggatacaaaggcaatgagtacatgatccttgaccttgagaaacctatagtctaatagaggaggcacatataaaagtaattaggtaaaatatagtgcagaatatgcagtcatggagtcatctacagatctgcctggaatacagagggacaagtgtttagtattttccaactgttcacagaggacaagacacttgggcagaagtttgaaggcaattccaggttagcagtacccacttgatatggtttagctgtgtctccacccaagtctcatcttgaactttagctcccataatccccacgccacatgggagggatttgaatcgtgggaggtaattggatcatgggggtgggtctttcccatgctgttgttatgatagtgaataagtcccatgagatctgatggttttataaagggcagttcccctgcacaaactctcttgcctgctgccatttaagacatgtgtttgctccacattggccttctgccgtgattgtgagactttcccagccatgtggaactgtgagtccgttaaacctctttcctttataaattactcagtctcaggtwtgtctttattagcagcatgagaacaaactaatacaccacttgaattgctggtacgtctgaggggcttgactcccagtccttcgaacatggaggggtagcyctttttctaagctcctcataaagtattgtatccaattcttcagaagggatgaaggtatctggtcctgtccgcaaacagagaagtgcttcttrtactgaccaggcagtgacctaacgcagtccttgagacaattccaggtgcccctcaggccgtttttccaccctggtgtttttctttgtatagacagcctatgcctggataagaacatgctgcgtcagasagttctttttcactttgcccctcaaaatgtgcacaccgacagccacagatagatcccagatgtctttttcctgmtcttgcaaaccttgaagtgggccctgccggcaggcacacctgccaaggaaaatgctgtcctcgaaatgttcctggcaccgttttcaagaggtgccgaccaagcgctggaattgctgacctccctgaaagagaagcctgcagctgcggcctctggggtgaattccccccatgggaggacctggtggagttaaaacagackatatccacatcacagagagctggcccattgctcagggcctgggaagtggtagggagggaccttcccagaagagagatgactcaggctggtcccaagcccctcctgtagaacaaacagacaaggtgaggagcaaggaggcatttggaggtcatctggcccagcacccttgtctggaagacagatttaagttccataaagtcacttaggaggagaacatagtccaggttgaaccttgctgcctgccctctggttgaaacatcagtgttgaatcaatagaccacgtcctgtccataccttgggaattagactcacccagactctgagttaagagtttctatgagacagagggctggactgggggagcaaggcttgcaaatcgaaagcatcagttgctacccctgagcaccatctcccataggagactctttgaacacttttttaaaaggcaagatgttggcctggcgtggtggctcacgcctgtaatcccagcactttggcaggccaaggcgggtggatcacctaaggtcaggagttcgagaccagcctgaccaacttggcaaaacccagtgtctactaaaaatacaaaaattagctgrgcatggtgtyacatgcatgtagtcccagctactcaggaggctgaggcaggagaactgctcgaacccaggaggctgaggttatgttgagccaagattgtgccactgtactctggcctgggcaacagagggagactccgtctcaagaaacaaacaaacaaaaaaagtcaagatgttgacataacagttctgaagaccaaggtggtggaataggttaggttaggatacgtcggaggagccagtgtgaactgctcctttaagacatgaattagyccattttcatgctgctgataaagacatacccgagactgggcaatttacaaaagaaagaagtttattggacttacagttccatgtggctggggaggcctcacaattacgggggcagacaagagaggagagcttgtgtagggaaactcctgttttttaaaactatctgatctcgtgagacttattcactatcacgagaacagcatgggaaaatcctgcacccrtaattcaattacctcccaccagcttcctcccacgacatttgggaattgtgggagttacaagttgcaattcaacatgagatttgggtggggacacagctaaaccatatcaaaacataactatagctgggtgaagtggctcgcacctgtaatcccagtgctttgggaggccaaggtgggagaattacttgaggccaggagtttggggctagccgaggcaacacatagagacaccgtctctcaaaaaaatttaaagaaacttagccggggccgggcacggtggctcatgctggtaatcccagcactttcggaggcctaggtgggcagatcacaaggtcaggagatggagaccatcctggctaacrtggtgaaaccccgtctctactaaaaatasaaaaagaaattagcctgacatggtggcacatccctgtaatcccagctactcgggaggctgaggcaggagaatggcgtgaacccaggaggcggatcttgcagtgagccgagatcgcaccactgcactctagcctgggcgacagagcaagtctccgtctcaaaaaaaaaaaaaagaagaaacttagccaggtgtggtggtgcatacctgtagtcctagctacttggaaggctaaagcaggaggatcacttgagtccaggaggtcaaggctgcagtgaactgtgatcacgccactgcactgcagcctgggcaacagtgcgaaaccctgtatcaaaaaaaaaaaaaaaaaaaaaaagaaacacaacttaccaaaccaagaaacttacagagaacatgattagaagctagcatctgtttttaccctaccctcttcccctatgacccaccaccacgcaggccttgctaatgtggggtctttgtggaggatcttcaggatcttcagtgccagaacccagcatttaaactcttatttgacagtggggccacagcagatttaaaaggacaatgacatgataaaaaatgtgttcctgagagatttaaatgcaggcctatagagagcagatgttaaaagagaagaagcagactgggcatggtggctcgcatctataatcgcagcactttgggaggccaaggcgggtgcatcacttgagcccaggagtttgagaccagcctgagcaacatggtgaaaccccatctctacaaagaatacaaacattagacacttttcaaaagaagacatttatgcagccaacagacacatgaaaaaatgctcatcatcactggccctcagagacatgcaaatcaaaaccacaatgagataccatctcacaccagttagaatggtgatcattaaaaagtcaggaaaaaacaggtcctggagaggatgtagagaaataggaacacttttacactgttggtgggactgtaaaccagttcaaccattgtggaagacattgtggcgattcctcaaggatctagaactagaaataccatttgacccagccatcccattactgggtatatacccaaaggattatatatcatgctgctataaagacacatgcacatgtatgtttattgcggcactattcacaatagcaaagacttggaaccaactcagatgttcatcaatgatagactggattaagaaaatgtggcacatatacaccatggaatactacacagccataaaaaaaggatgagttcatgtctcttgtagggacatggatgaagctggaaaccatcattctcagcaaactatcacaaggacaaaaaaaccaaacactgcatgttctcactaataggtgggaattgaacaatgagaacacttggacacaggaaggggaacatcacacaccggggcctgtcgtggggtggggggaggggagaaggatagcattaggagatatatctaatgtaaatgacgagttaatgggtgcagcacaccgacatggcacatgtatacttatgtaacaaagctgcacattgtgcacatgtaccctagaacttaaagtataaaaaaaaaaattagctgggcgtgatggcacctgcctgtaccccagctacttgggaggctgaagtgggaggatcacttcagctcaggtggtagaggctgcagtgagctcacatcacaccactgcacttcggcctgggtgacagagtgagaccctgtctcaaaataaaataaaataaaataagcagcagcagcagcagctaggttccaaaaaaaaagttggaagggtgtgatgggattttagttgctggatgctgaagttctgccaacacagtgggtttggagagtaggagtgaaagagtggagactggccataagttgggagggtaagtaaytggttgtgattgaaaggaaagaaggaggtaatgatgagttttggtctgggaaccggagaatggtggtccatggacagaaatagagaaggcaagatgagaagatgcaataggcaaaggcagtgagtttaatggttgacttttggtatttgctgtgtatgccctctgtacctttgacctgggccttcaacccttggacagagcttaagatggctgcgtcccaagtggtccatcccaagcgagttttccctggacttatctggaatgactctgaaccttttgaagaccccaaaactaacccaagctttgcatgatctccccaggatgggtaagacttcttactctctagagctcttttctctgtaggcttagctactcagtgaataaataggtacataagtgcttgctagcaagcagctgaggcaacctattaaaactcatgccagtggtaaagttaagctgctttctggtaagaatttcasaattccaggacgtctcaaatttctggctggtacaccytgggyaaggtccacaggctggatgggttttggaacatgtcttgattgtactttttcctcttggtttggaaagcaacrtaccctaggtaaggagagatttctgacaacagctcagcaatcacagtttccagaaaatggctccagtggatcaactatgagttaagtaaaaaaaaagtcagtgctaccgtttgaagtatgtctagagtatggttttaatccatcgctgtcaggctcacataaaattccaggcttctgtaactctttaacttgaagtattacagggtgtcacctgctaaatggaagccaagagaagcaaggagtttttcatggttaaatcttgtaaagatgctttttaaagcatattaatccattagtaatccatttggatttgggaatacggtcatatactgtttggtacaatatgtactaaacctggtcctggaaaattaagtggaaatataggtttaaactactggaacttcaaaatagcttctcagtaattccttctcagcaatcattccaattcctagatttaaaaaaatgttgatatatcaaatttccatcaagaggaacatacatatggatttttggagaggggagcagagcagaagagaaaactttcaacttttaatagtatttcaaatttacctgaaagtgacccaaataatacaagcaactgtttaccctgattctccaatacacctgcatctttaattatgctaatttgatacaggtgtcagattatgcattaacaaagacatcctttttctttgagtatgtgttttctatggttatgtaaattatggaggtgctaaacatacctttagagaactttgtatttgtattaactttttttttttttttttttttttaatagcgatggggtttcactgtgttgcccaggctggtctcaaactcctgagttcaagtgatctgccttgcttggcttcccaaagtgctgcgattacaggcatctgccaccgtgcccagctatagagcttcatttatttatttatttatttatttatttatttatttatgagacaaggtctcactctgtctcccaggctggagtgtagtggcatgacctcggcttactgcaacctccgcctcctgggttgaagcgattctcctgcctcagcctcctgagtagctgggactacaggcacatgccaccatgcctggctaacttttgtttctttttaaatagaggtctgtttttactatgttggccaggctggtctggaactcctgaggtcaagcaatctacctgcttctctctcccaaagtgttgggattacaggtgtgtgccaccatgtgtggctatagaactttttaatgtgccaaggtctgtgttcagtgttttcttattcctcatctgacttagttctcaaagtccttgcctaaggtattgctgtcctcaccgtcctatggggagataggtcactttcccaagtctgggcagccagcagcagggctaagatcaccactcagaccctgtgwttttatttttcatctcctcacatctggcgctgaatgtcaggaccttcctggcctctgggaaagacacaggatggctgttttgagaggagtgtgaaatacatgaaggcaggacttccacacacctggacgtgaactagaggtgaggtggggaaagacaggaagtagatcagtgttgcccagaccctaccttttccaactagggtgtggaccatccttcagagcttggcctccaagttggaacccgtgtataccactgacagtgtttcctgggatggtgatatttatcaagtgcagaggcccagacacagagagcttgaggacctttgtgtgagacagtgaaaccctcaaaggcaagggctctgtttcatgagttttctatctcctgctgctgtctcggtgggcctgtttgagttgacctgtcccgtcggtattagcaactggcaacagtgggtttttgttaaatacggcaaatattaagagtcgtctctgggcattttagtttattcattcatttgttcatttattccacagggatttattrtgcatttactgtgtactaactaatggggagatagcaatgaaggcagactaagtgtctttgttctagtgcagccatatagtcagtgaatgaatgagtgagcaagatacaggagagaagtgaggtatggcccattataccagataaagtgatagagaggggctggcgaggagagcagtctaatttcaggaaagtcagaaaagtctttaaggaaactgaaggctgagctgccagggccagccacrtgggtactggagagtgggaggcccagtcasggggaatgctggcttagcacaactgaaaaatacaaaggtagaatatgaagtgtaatgacatggtttagattgaaatctgatgtggatggaaaggttttgtggcctttcagcccaaggtttgaaaaagaaatggaatttctaaatggagtgggyagccacaggagggctttagacaggacmgtggccccgctggattttctgcccattgacttgggctcgaagtcacgtccatgttgctattacagatgcctcccagaacagtttatataatcrtcaacgtatattcatggagcatcttctgtctgctagacacagaattgggtgttgggctttaaagatggatgaaaggcagtacctggtctagagaggctgctacctggatggtgtgtttgccatcctcagtartgtgtgtcccttacagatgatgcccartgactctacaattgctgggatactttttagaattttctttttgtgcattacttttgattcttggttctttctttggcattagctcaccagtggcaaatatgtatcctttaagggtggacttaattttttgagaaatggccaaaagtttgtttcaagtctagtctgatgaataaagcaggagatttatttttggcaaaagtggcaaataaagagggctgatttttgtatatggctactgaaatggcttagaatgccattttatcacatggtcaaattattcaatgatcaaatatcgaattattaaaaattatcaaaaggaagttccctgaaacatgaaagtgtttgggctttgtaggtacccaagtctactgggaaaaatccccatttctgggtaacccagccccttttaatgacaacttcagttctccaaattccacttccccttttagcctgcctcccttccgtcatccttcatcaaggtgacataggtctggcgatctttttggcatagacgtgtggacgttgtttttgacatttgtacatgcttttgctcaagttgaaggccsaagtttacccaattcractgcccccacccagatagaatattcatggttagaccataaactacataactggaaattttaaatctatttttatatgcatacaaaaactgcaggcctgaagcttctaaaaataaacgttactttcatcccattatasaaaaatgcatttgaggtggtcatcattttatttgggccagggtcttccgagacttgggacaataatatattttttctactttaggcaaatgtatgcagattcttaaagcatgaatgctgtattacacacattataaattcgagtaacagaaatgtttgtgtgtagaaatagaatacggagtatatattttgtatwaaataacctctgtggtatttgtttaccctgattttttgatttatgagtcgtcattgctcgctatagaagaagaaaaataaatatgcaaaacagtggtagatttttaatggggttacttcccatcttagctcagtgtttctctaccaaagctgaccttgaaattgctttttagatacaagtcaaaatatgcaaattccagaatcaggaggagtatccggtgttaggagttctttcgaagtcacatttttacatcatttccatcgacatcccgtgttccatctgcttcttaatccattagtacctgagtgggggtatataggttttctcaaatgctctaatctccacagaagttaaaatatccctaaacaggcatgtgcayatatgtctttctttcttttcttaggttaacttttttttttttttttccttttgaatgaccacaaagcatatctacccagcggggttactttttttttccytttcagtattcatgacgtcaagtccctgtttgttatcttattgtcctcttatcctggtccttagagtctttcaagagaagaggttgatcccggtgtaatgtacagcttcattctaataagttgtatcgatcatgtattttcagtcactcttcatgtctatgctgtccatttgcttggatcccaaggaattttcttctgcccccccaccccatcccactcatatttcataagggtcttctggaacctgcatggtgttgggatgtatatatcacttttcccttgttatgaccagaaagactcacagccatgaatttcactgaagtttatgattggtccctgattgcctcacatcttgcaaagaatcctcttctagaaagcgttcttgcagttagattaacaagcagatatactgaactggtgcatgaatgaataggaaatatcccagttgcaaaggataaatctatcatgtagtggagagcgtgttcaggcaaaacatttggttctgcggtcgcttggaggattgggcccgtgctataattaatgccactagcagtaaaaggacattagggatgtcgcgcatgttgattatttcttcattttgtttatccaagtttccccgccttggaagctccgtggccattgccaaagaaagccctggagacagagcgttagccgttgctcctcgtaagcgcatcattaccttcctccgaacaaagtcctttttttttttttgtcagtagagggtgaaaacattattggattcaggagttcatagtagtcctgtatgaagctggggacggggggatagagttatgaaatggaccatttcaaatggcattatcttcccacagtgaggtacacctttcataaatcataggagagtgctcagaaaatagagcatttgttattcctgcagtacattgtatttgcatcccccctactcacaggaaagaagaaattctcaggtttcctttcccaggtttgaaaaggcagttaatcgccttacaatgaaattatatttttaaaaaaggtatcataatcaaataaaagaagtacttcatgtaagtcaaggattgtgcttttactactattttttctttttttgtaatcatggtggttctttttgcccacttatttaggccttaatttaattacggcgctgattaagttctttggttttattttttactgtaaacattgtgctgtattccgtaggaaaatgtagatgaatgtgggtcattgggaaataaagtgggtggaagtattggcgagcatttctttcccactctctacctcgcctggtctagccgctgataggtagttactctttagtatgcccaagttcaaattacgtatgactgtgattctaacacggaagcgccctccttttctagtagcttggatgtgattggtatggagaagcagagtgggtgcgtctttgtgtgttcttgacatagttaaagagtttggtatagtcaattccctttaaagtagtaggcttcttaaataattctagttgttcctcgtgctgccaagccatcttgaagaatttttcttcatttgtaaggggttaaaagtcatcaagctgattgaaaagtcaagaacctctagcgcagcctaccccttgcatatttgatactctcttttgcactctcgggagcagttttgaggacacactgtaaaaatgtatgacagcagtttgaagataagtctgttgccccaaataatcataagaagaagacagaagaaaaattgattcccgtagctctctgggcagtgggatgggggtaaagcaaggaattaataaaaacccaccagaatacattatttcagacaatcaaggagagcgttacattttaaaggtacttcatctcagaaagtttgagacatacttttcacacgtggcatgaagagaaaatggaatggaatgagcactaatgaggaccttgaacttaactaactgaacttgatggtcatcgcaagacataggggagaaatattttgagacatcattgtgcaggcaaacatgagcaagaaattgagaaatccgttcatgcacttctctctggtttcccggaagggatgaattccaaatcccgtggctcaggtcctaggtcaaagacagctctttagaaagagatgttctttgcttctttgctgactgcccatcccctcctctctctcaaggaaataagatattcatttgcaagtaaataatgcagcagtcttggatttgtatcagatcaactttgaatgaaagcctgcctttctgcgtttatttttgcttatctctcctgcttctgcttcctgttttgttaaataagggcaatgacggcaactattttaaattgctataaagttttagctagacagcgaatcaaggtggcaacacatggtgggttcttaaataatagttgtcatttgagtgctttctatatgatgtacatttcattttgcactttacaaataacctcttcctttttctgtttaatcttaaaaaagatcccgggaggcaggcgttattgtgcccatttcctggataaggagaatgaggtacgctaaacgagtaaaaagcaacccgagatccaaaccctttggcattcaagattacactcttattcactaactgttcatctcctccgactgcatcgccactcccccaggccagataacccatccagacctggagaactcctagagggagaaacagggaggacccaggcacataaacttgcagagcagctgagttatcagatcttccaagccatggggttatcgagctttatcagagcagccttgctcttgcagtttctgacacatcaccattgatcagtcctgggaaacaaacaaaatagagggcgatggctccactctgtgtggccccgtcaatggcctggacgcagctgaaaaaatccagaagagtgtaggacactggaaaagtagcagggtgtgcgattgcagggatgggaccagcagtaaaaggtagccctgccaagaccattaagcttcctgcaactccttctggatcccacaatttgaaggggaaatctttcccaccgcacatcactgtttggtggactaaatggctccccgatgtcccgaaagagcacagcttctggaagtgtggtatgtggtccctgagatgaagcagcagccacaggaacccatcattcctgctacccaaggcctccattgcctggttttctgttgtcagaagagttcattttcaggtccttcaccagatattttagaagctcatcaaggaaaggacgtttgaagaaaaacaaataaacaaaaacacaaaatcaaggacgtattgatttctgagaattcctcctgggttttgtttgtttgtttgtttgggggttttttgctgtggtattgtctgagcctatgataagattgttgttgattgatttttgtctttcaagactcagcacaacacatcccatccttctggataatctcttctaccctccctttccagataaaagttgactctcataattgtaactctcccctactttatcagcatctacatctttcagcctctaccacattgaattggaattatatgtctgttttatgtaccatgctgtgaactccttgaagataggagctgtcttatcttcaaggtgctcaagacacgtttgttgcatcagttgaatggagtcaaattataaacaggtgatgggggcaaatatcacaatatgatactctgaacatcttctctgacaaaaactggtcctcaagatacaacaacatttatatttgatttgtcttgctgtatcgaatcaagctgtggtcttgagtttcgtacacatctatgtaagcactctgaattgagtgactctttcccaaagatcatactgggatctttggaatgaatggcgggtcacccatccaattgcttttgcggagattcgagcatgtggggaatgcaagtcacaatatcctgcaaaagccaacttgagacctcctaggactgcactgctgcttatgacactgatccttagcccatctaagtaagtgagcatggccctgtaagtgaaattggagaggttccttgacattcccacatagctgcttccctggtaattcacctgggtccagaacacagaagggagattctaattgaaaaacttttcctaaaggccaggcacagtggctcacacctgtaatcccagcactttcagaggccgaggcagggagatcacttgagatcaggagttcaagaccagcctgagcaacatggtgaaaccccatctctacaaaaaatatagaacattagctgggcatggtggcgtacacctgtagtcgcaggtacttgggaggctgaggtaaggggattgctggagcctgggatatcaaggctacagtgagccgagaccgcacctctggagtccaccctgggtgacagagtgacaccctgtgtcaaaaaaagaaaaagaaaaagaaagaaaaagctttgcctgtatatgtagaacaaatgaaaaccaaataacagtggcaccagttcttctttcagtttccatggaatatcaagcacgatttgagttgagcaatttgatttgattgatcttcttaaatgtataatctcaaactttacaataagaaggctacttgtctttataattgtgaaatccacccttagttttaatgcatctaaagtctctgtatcaaaaagatcaaaatcaggtttgaaagtctgtactgtaactaaaaaagttttggggtttgttttgttttgaccaatttttgtaaatctcttctgttactgtttatatacccggccacttctgccaaaatatgctggccttttagtcttttggttttttctctcttttkgtttgttggcttatgttcgctgcttgrtctgactactggttttatttctaaggatttttttttaagttggcatctttttttctttgactttccttgtatgcccccctttctcccctgcattgtcttgcttcattcatttctttccaggttcctgcaaattgtttttatttagggctcatctggtatgtgtattatgttcttggtagacagaagctgtctttagttcgtatgggttgagcatggagggaacttcatctcrtagtcactggataaggagccagtcctggctcttcctttaactgcccttgtgaccttgaacatgtcagttcatctcaccacgtagtcattttctcatccgtctcttcaggctaataatcacctgtcctgccttcctcacaggcttgccgggcaacccaaaagagccgctgatctgcatagcacttcgcaatgaagctgtgctctagaaacataccacgatctactggactttcttaaataaggtggttgttcaggaaattcctcyarttaattttactttaattccccctacaagaatgccgagacacctctgcctattttctctttctgtgtttgttgtttcttttgtttttgttttcgagactgagtcttgctctgtcgcccaggatggagtacagcagtgcaatctcggctcactgcagcctccaactcccggctccagtgattctcctgyctcagtctcccaagtagctgggattacagggatgcgccaccatgcccagctaattttttgtatttttagtagagacggggtttcaccatgttggccaggctggtcttgaactcctgacctsagttgatctgctcacgtcggcctcccagagtgctaggattaaaggtgtgagccaccgtgcctggcctctttctgtttcaaagaaatagtcaagaagtttctagatgcacacaaaatgaccaaaccagtctttccgcttatttacacaatgaagaaacatcasagttcaccctggaagacagagtttctttctgtcttcatcctagggcacaggagagatgcagtgatggcatgtctccactctgcagacatgttgcaggcctggaaaactgtgtggtgcgtctgtttttcagagcgttgagagtcatgcgggccatatggatgcagtggtccacagaattggcagtgagcccccgggggagctcagtgcaagacaagattctggcgtaagaactgcggtagcaaggacaagagggcgtcacggtgtaagaatggccgtggcaaggacaagaggacatcacacgatgaccttctcagagtcagtaggatagtttcccttcctggaagattgagatgaaataaagctttaggagttggtatcgcacgcaggcattaaatggattgtgaasagggactttgttcccsctcagtcttgtctctgcctccgtaaaggagtaagttaaaaaagaaagtttctttttttaaaaaaaagccttactgctcaataaatccctgtggaaaaaaaaaaaagagggggaaaaaggaatgcacattagtcttccattaaaaatagatcaaaaaagtacccaaaagagaaaaccccataacaatgaaataaattaggataatccaactggaggcctgcaaatgagtttgctaaatgttatattttctcaagccacttagatttttaactccctgtttctgcctgaagcaataaaggcaggaacgctgtcattagcttcaaacaccattttttaagcccctagctgcatttgttatttttctcttcccccccttagctgtatccctgcatttattacagcgcaggtgcatcttgcttttgagtgctaactgagatgaaaggagtgagraaacgctctcttcttcttgcaggggagggctggcaaattcagygaatgcagagtcggctgggagcctttcggctggaaagctcttcctctgatgagctgtctgttacagattttcagggatggcccttgataaggcaggggtgtctgtccacgccacactgtggtcagataacccccgatcgtaataagccggaggataatcgcttgcattgttcaataaagcaattgctttgtcccctcacttagccccttcagaaaagccaraaagaatgtgccacctagatgctatttataaccattttcacctcttgcctccaggggctaaattggaaacctaattttagatgcataaaagccaaaatatgtataggagaagctccaaaataaaatatcccagagtggcttgtaagcatccttccaacaggttcaggttgatttaccttgctgtggatatttaattatgtcattgaaaaaaacaccagtaattaaatcattatttcttagatgtgaggtccaaggacattctagaggaagtcaaaggcagagggaggaaggrtgggacgatggaggcctgaagggctggtggagaggaaagaaggcagcctgtgccgtcagagagagttcaactccatccgtgcagctgctagcatcttgccttactcagcctctgtgaaccttaagttgctcagaatgagacaggtaacacctgcctccgtggtttgtcaggacatttagaaatgcagacttgctcaagacctggatctcaggtggtaggttggtccacagacagtggcaccactmgctattatttatttgttgtcactgtttgggacccctgttgctgtctcaccaaagaacttcttgtctcccttttagaagtttccagagcgtcttcctgatgttgcatagagcactcacacctaacagatctcagaacttgtatcttttctgggtggctagactgaaaaatccattttcttatgagtgagccagaggtctgtctcttgcggcatttctgcttttgagaacctcccgtttcctgaaaggcaccagaccccaagacagctctgctgcctgattggtagatgcccatgacagctctgcttcatgcctgctgcctcctcatccctctggatgccttgtggtcctgcttgtctgaagagcataaacttgggggttcccactcgaaaagaggttccagcagttccagcccctatgtcaggggagccacttttggggctggtggtaggcagaactttggccctcgacatctcctctgttggcattactcctatggtggtgttacgtaacatgacaaaagggaccttgcagatgtaattaaggtaactaatcagctgactttagaataggaaggttatcctgggtgattagcatggatcagagttctcacaggagcccttcaaagcagaaggggaaggtggacaagagaatcggagagatgtggcrgagggtaggcagagagattgcaagcagggaaggatttcacgtactgccactggctttgaagatggagggggcacatggctagaaatatgggcggccctcagaagctaagaactagctctttctgacagccagaaggaaatagggaccttccacctacaatagcatggaaaacggggacctcagttctgcaactgcatggagctgaattctgccaataacctgaataggtttggcagcagattctttcctggagcctccaaagaagagcccaggctggctgacaccttgtgagtggccttgtgagacctgaaacaggaaacccacctgagccactctttgcctgggacttccaacccacagcaactgtgccgtcgtgactagatacgtttttttaaggggatgataatttgctgtggcagcaatagaaaatctgatacactgtcatggggccttccacagggtggggctcaaccagccctcagctcatctagcatgtttcctcctacaacctggactttttcctgttgtcccctcccgtgacactcagctccctgcattcaatagaattgcttttgtgggatgatgagtgtgttcagagtcatactcagcctaattattgcttttgaccaaccccaacacataatgctgtatgtcatgctgtactacttttaatttcacagatgaacacatttctgttcttttaatccacctctccaaggctcgtgttaactccatctggacaaagccttgaggtatacgtgtggcttcttttgagcatcgtgccatagctgtccctgatctaccttgcggggcaawcacaacaagtaaaaggttttcctcttgaaggattgaacgcctcaatgcgtgcatcctacattgtctagtgggagaaatctccgttgtagattctgacatgtcactccacatctttgtaactttttatggctctcagccctactttcttaatagtagcagcagtatttatctactgtttattgtattccaggtaaaggatatgygaagcacttttcatgcattatttaacctagctataatactcccatttgacagatgagaggactgaggcttgtagactttccaaggctgtgcagctctaggtctagtctgccatttgaatttgggcgatgataccagagaccaagttctcaactatgatatactgcacatgtttttgtttttgtattttggttcaaaaagagagtatgatctcacttttcccttcttgataggttgtagattccatgtctaatccatscttttccaatattccctcctaatctttcagttgaattayggtctttagctcaaatgcrtgacatgatgtgtgtgcctttggagtggggcggtattagtcagtcgatggttatttccttgaggaraaaggaaaggagaagttgagtacttttcagtgtttgttactacaaaagcatggtggcatgccattgttctgagaggaaggggsttttttgccttgtcagctcctgatgaaaaagatgttgggttggaaagctaagttacagcaggtgaacttgaatttgaggaaagacaaagcaaaccctggctattaaaggaacacacacacacacatacacacacacacacacacacmcgtttctggtattaggaaatggagatttctaacataataaaaaagattgaacttaaaaatgacttccattaaatagggtaagaattttgaggtggaatcctttttccttgggtcagtactttctgcaagcttctaagtaatggtttctcttagacactcacggtgataaaattgggagttttcaaatgaaatctggaatgatctactggcatcatgcctaggactttggaaaacttgaaggttggcacctttggggaaaaccagacttttgaagcaggggctctgattgtctcttcttattatagtgcaaggtgtttggcagaggtgtggtagctgaaggcccaaggataacattgtccagattttcagtctttggagccataaacatccagttctttccagccccgctcaaccgcctctcttaattcaccaccctgttagcttcatctcaggccagacattgtaggtggcagcaattgtaggacaatgagaagaggccagatgaggacagaatttttattttccattgccagtaacaaacacagccctaacttgcttagaccaaagatggggattgaytggcaactgggaagcctaagggtggatctggcrtggctggatctaagtgattaaatggcgcggtcataattctatttctctgcatctctcagctgtacttccatctctgtaaacttcatttgcagacatggccagcatgcgcccatagccttaatgctcagggaatattggtgggagagaaagctcctttcctatagcttcagcaagagtcccacggctgactctcattggccctcagtgggtcacatgtaaatcattgagccaatcaccgtctttctgtctggacctggaataaagaccaccttagagcatgggagcgggatccccttgatccacaccatatagactgtgaggtatgaagtacctcacagtaaagaagtcatgttattgctggaaaaggggacatgggtattaaaaagacaaaaacaacagggcttcatcacagcagctatactgctccatcaatacccatcccaggagacagtggcagtcttgatgtcaatcttgttttaggatcattgccagtggaattcaggactgcggttctacccggtaycggggaaccaggtgagggggttaagaggcctgggcccatggaaggggtgagagagagccacatacttacagttgtgaagggggccagccaggatggtggcttgcaggaaaggtctgagcagagtaagaggcagttcctggcaccagcatgccaaaggcagatagcaacactcttcaatggatgtgggtgagaggacagtggaatccagcaggggccattgtttccttccataatatttttaaactgyagcaaagtgatctttttgagacccaaatgtgagtatgccattctaatcttcccaccctcagataaaccacagcaatgattttatactgtctgtagggtaaagacagacccctaatcataacctacaatccctcgacccagtgacctagcccccgtgtaccttccctgtctcatttctcactgttatcattgtaaccctctaccctctcttttggcttcctgcagttkccctcctgcagcagggcttttgcacatgctggtttctcccttactttgcctctactcagtctttatatttcaactcagtggtcactgtctctaggaagccttccatgactgcattaaatccttctataagttttcatagttctgtgcatttcctcttggcagcaatgcactgagctgcagttttacatttttgtttttttgttttttgrgtttttttttttttttgagacaaaagtctcgctctgtcccccacgctggagtacagtggcacgatcttagctcactgcaacctccacctcccaggttcaggcgattctcctgcctctgcctcctgagtagctgggattacaggcatgtaccagcacacctggctaatttttgtatttttagtagagacggggtttctgccatgttggccagcctggtcttgaactcttggcctcaagtgatctgtccacctctgcttcccaaagtgctgggtttacaggtatgagccaccacacctggcctgtttttgtgtttgtttattaattcctatttttcccacctgacagtacgctccgtagggcatgtgtttgtttcggttccccaacgtatccctactgcccagcagaaggcttagctgttaacaagtgtttattgaatgagtaagtgaatgagtacgtgaataaatctgcgctttagaggcacttgctcaggcttgtggaataattctacagagagaaacaggaatcaaagggaaacctgaagctggctcagaagatggatgggccagcaaaggcttcagcaaaaccacacaatgctcatgaaaaatcacgcatttctctgatttgtggttattgcttccctggattttttttttttccagttgttgttgttcatggtggtggtggacaatctgaccatataccaaccaaattgactgttaaattcaatcatcagtgaccactcctgataatctgacctcctaagttagagcccctgggaagttcagccgtggttctgaccaggcaggataactatctaagtgttcccctttggacctagactgagccaaagwttctccttggtctatataggataatagatttctaaaacaaaccaatagctcaggcacaattatagtggggggtggggggcatgtttaacctactttagagaacaaactctttttaagggctttgcacactaattgtatgcaaatggatgctgctaattgcaaacacaaaattcaaacctagtcaaatttgaaacctgttcatcaacagtccctttaggacctctgccccactctatgtatgcagtttaaattgctgatttatggctacataatgtcttcctaacccccagtttactgttggcttccttcagagtcattgccccaggggactcattgacggcagagagtgtgtcccctccactgttgcctcaatgcccagctcagcccagtgggtaccgtacttcaaaacctcttattgaggtccacctctgtgccaagcatttcggtaggcagtgacagaagagagtgcatgcatgaatggataaactctttcctggaatgcctgctctcatcacctggtttcaaagtcgagccagacgttctgtctcagctcagattctacctaccctgaggttcgcagctgggcatgatcgagccactctccactctcctgtagcatttttgggctttgagtttatttgacacttttcacttgctgccttatattgcgtttatttttattaattacttcagtagtcatttacaaaatgctgctgaatccaagtccctgtgcaagatgctgcaggagacaaaaagatgaacaacacgtggtctttgctttcataggttatttctcctcttccatagcaacacatgtcaaggcaaggaccatatcttattcagttcctagtcatcttttctttcttttsctttttcttttttaaattgttaagatctgccataaaaatgtctgtcagagtaggcatgattgcatattctttagatggatgggtggatggatggatggatggttggatggttgggtggatgtatggttggatgattggatggatgatggttgagtgagtgggtggatggataggtggaaggatgaatggatgcatggctgagtggatagaaggtggatggatggagggatggatggttggatggttggataattggatggatgcatggatgtttgggtggatgaacagatgaatggatgcatggatgaatgagtagttggatggatggataaatgatgcatggatagatgaatggtgaaacttttatattttactaaaaatctgcattgatagcctagtggcttgctaaaaataagggagctgcccaaatgccccatttcctttatatacttgtggagcagcagcgaaggccaagccagtgccaggggctggaaacagacacataaataagaacaaataagatacagacctgacctcaatgattttttgatatagaagcataggcacataaataaattcctgtaatgggagtctagggtgaggggtggtgggtgccataataaaaattatataaagtgctatggggaagcaaagctacatgaccaatttgttctatttatttatttgttattattatgttttttgagacagagtctcgttctgtcactcaggctggagtgcggtggcatgattgtagctcactccagtsttgagctcctggactcaagagatcctcctgcctcagtttcctgagtagctgagaccacaggcacgggacaccatgccagtctaatttttaaattttttgtagggacagggcctcactgtgttgcccaggctyatctcaaactcctggcttcaagtgatccttctgcattgtcccccacaaagtattgggaatgtattctttcctgatcaggaaactccgcagagagaaagtgacagttgaagactatattgaattttggcccacaggaaaaggaaactttgctgttagggtcagctggaggagagactgcaggggtcagagatcagggccatatgctagagctgcartgtgggtgctcaaatgatgttcagtgcatcttcacagatggacctccacatgtccctcatgccctaaaatagatattctccacasctgcacatacaacaacgtcagtgaaatccgttgagaggagcattgaggagatgagtcaggtgtgccgcagcactcaggtcagacttgaggcaagtgagaggtgtgagttattcagagtcccagagagcttgggccaaaagagattctrtttttactggagcatgtgagggtggatcacaactaggatggcgcgaagttcacctcgtgtaagcacaccaggctgcagggataataactgcactttttaaaaccagcaaatcattcatatttactttatgaaacctcttttaactttattttttatattttttttattttcttgtttctttttatttttaaaatttatttttgttttttttgttttgagacagggccttgctctattgcccaggctggatggagtgcagtggcccaatcatggcagcctcagcctcctaaactcaagcagttctcctgcctcagcctcccgagtagctgggactacggttgtacatcaccacctctggctaatttattttttgtaaagatgaggtctcactatgtttcccaggctggtctctaattcctggcctcaagcgatctcccatcccccctcagcctcccaaagtgctgagattacatgcatgagccaccatgcctggcctctggccttcttttcactttagaaaaaaacaaaaaacaaaaaacaaaaaaaaacacamaaaaaacttttttttttagaactgttttagttkgggagccaaaattgagcagaaagtacagagagttcccgtatacctccggcagagccctggctcactatctacatccccactagatccatgtatttgtttaggttttgggggtttgttgttgttttgagatggagtcttgctctgtcacccaggctggagtgcagtggcaccacctcagctcactgtagccttgacctcgagggctcaagcaattctgctgcctcagcctcctgagtagctgggattataggcacatgccaccatacccagctcatttttttttaatatatatttttagtgaaggcggagtttcaccatgttggccaggctggtctctaactcctgacctcaagtgatccgcccatctcggcctccccaagtgctgggattacaggcatgagccaccactctaggcctgtatttgttttaattgattaatctacaatgacacatcatcatcacctaaagtctataggttcattaggttcacagttggtgatatatattctgtgggttttcacagacatggaatgacatgtatctatcatacatcatatattgtatcatatcatatcatgtcatatcatatcatatcataccgaataatttcattgccctaaaatacctctgttttcactttttaatctcttwgtgcacacatcaaaaattccttttgtgtttttgagtttcaaaagtgtgccacaaacaagaaatttgggatctgctgagcccagcctcagacctgtaggggaaacaaagagggcaacaggaggtcacgaaggcatgctgtgcccacttttggaaattgtgaaggagagtgtctcaaacatgtaggcttgagccactcaaarttctgggaaataggatgttttgtaaagaaagtttgctactgtcacttctgagtagttgcagtccctcccagtacgtgggtatcttcggtgagaacaaatttcctggcagcttgaggactccgtgtgttattcacatgctttatttaatagacttgcctcatgtgactttctatatcatcctttgtgtctaagtgatttgcactgggaagatagtaaacgctcccactttatatgcagaaggttgaaaacaccatgartgttgcaatctgaggtatctgcccttaaagaagcaatatttactgaaatgcagggcacacgacttttccagcaaaccacaccgccgtccttttgtgtgacgaaataattattttgagataccgacatgcgtgacgaccagataattatctgagaaaacttagcatctaatgatgctgttttgagatcacaagaaagaattatattagcttgagctgaattgttcttttccccctgtctctctttagttgtaaaaacacccacaaatgtgaatgcttcaggcctgaacttgtcaacagccagtggctcattgtagacatagggatgtcgcctgtgtttggggctgagacaccagaacaggtgttctgtgggaactgagaatgtctactgctgcacacctttaatctcgggtcttctttctggtgaaatacccgtgattcataactcagtcacgttactgaggtatgtctcttcggatagattctatctctaaaaactacagattctatctctaaaaacttaagtcaagggattttsaagcagttgtttgatttatgtatgtgaacctctcccttaggagaagaacttttctttggcaaacaccataggaacggagaccttaacaaaagaattaggactctcttgtcctgttttaatctcaaagctgtccctgcgctggtgcggctggcccacttgtgcctttgtgaatttgcagagaagaggctgggcgtggggggacacatgactaatccgccctttcttttgtttgtgcaacaactcaattcactgtcaccacatcagcacatttgctgcaaatctcagtgccctctcactttcgttttatttaatgcgtttctacattttcccaaggccacatgagctgttttctggcgcgtggtatgcctgcctcaaataactaacattgcctgggtcttggaatctgagccttcatattctccgatatattatttggtcctattgttccttaacttgctcatcattcacacggcgaaggaaattccatttggtccttttaagaccgccagactagctgacttaaacactcagctccagctacttctgaatatttcggttctttattgaaatggtccttttaatgtcatctttaatttaatcaaatagtgtcatcaaaataacatttactctattactgaaaattcactgcattattaactagtgtaactagacaaaaaagatggtacaaacccccatggaaatatatacttactgtaaaaatggatagagttcatggatgttctatatttaatttgcactttcaaagtactctctatggagaggttttatggttctgaaataatttaaaaacacactttactacaatccatagcaggtagttttgccaatttgggaagttatgktgccttgcagtttccaaagtaagctgaacagtgttttytaacagtgctgcccctctctcccactagaaatgcgagtccatccttttaccaagtgtggtacgacaaaggtttctctggttttcttttggtattctcagacaactgaaatataaattacatggtatgtgcaggtatcaccaggatgcaattagtttgatgaaatataccaagtcgtcaatgccactttggatagtttaatctgaaaataggacatggttgkggtagtgggcacaggggaaggaaggttatgtaattttaaaattcttcctttgattcaaaagaaaaaaacatgtttgttgcattcaactccaaagggtgagcatagcttagtggggagagatttggactaaaaaataagagttctgggttcaagatctgaggtaaattatttgctaggccttagtttcccatctgtgaaaaaagggagttctataacagcaagacatttaatattaaaataatgtaatgtttttaaaaatgcttgtctacccactttttcttgagattagtaagaccatcttccaattagaatgtttatccgaacttaccgctaggtatttccttgtagagtatgaaagtaaaatatcaatgggccatctctacgtcaaggttctcgttcttctcattactgagaaattatgttcctggaataatattgtacagacttagaaataagggcattgaacttaattcatttatttttcaaaaggcatgtattttttacctgttgctatatctgctgccagccaagtgctgtgcttggccctgagaaagcaaagagagatagagatgtccatgttttggaacttgacgtccattaggggacataaacatttgaaaagataacactaacaagctaattcaggtatgataataaaaaccttcacagggttagccatccatctatctgtccatccatctattcactcatgcattcatccacstgttcatccattcatctgtccattcatccatctatccatccatctacttctaggttgtgagaacccgtagtattgactctcagtgtgataggaaggccagtgtcttggtgaaagatcaaagagctcatcaaaatttgtcggatagactgcaggctcagacactgatgagacccccctgcaactaccacatcaaaaggcctaggagcctttccatgaccaaatgcccatattgatgaatccgagacaagtgagggaaagatgtcctctgtcggtgttctgaaccctgtggaaatcatacggggaactataaaagatcctgatgcctggttttcttctggagagtctgatttaattggataaggatacagcctgggcatcaagagtttctagatgacctaagtaattctcatttgcaaccaaggttgagaataaagggtgtgtataaggtgagagacttctggttaactaaaggaaataccaatgacatttgtgctttaggtctaccagttagtgggtattggtgcatggtgggacagactaaatggctacaggtcagggtcattgtcaaagagtgagggataaggggttgtgctgtggctcagaggcagagtagactgaggaagaacagctaattccagaaagccatgttgtggtgtaaaagatagtacctgacttgtaatgtctgacaccaaaaatgaccttaatttgggtcataggacaaagacctccccacctccagctatgaaagacagaaaatgataggactaggcttcatattttctagcgtaacgtttggcttgtggtatattcaaaactaagtccgtgtttgttgctgctgagtgactgggctgatactacctgtccttcagccatctagacttgctctctaccatcctcaatacttcatatgaaaggagactgtcacttcatgaaaatcatttatttgctttagcttaaatctactggagattacaactgcctcattttgtcaccttcttaccccagaaggaaatatctccacaagagagcaggtatttattgagttatgactgtcaggcatggaacagatccattggtcagaaataaggaaattgtctctaccttcaaggttctcacagtctggagggaacagagagccatcagggacaataggtccctgtgccatcagctactgggatgtatgacttyccagtagaggtacacagcacttgttccaaaaggagcctatgtagctttgggagttctctatttagtcaccttattttttttgtcttcttgttaaactagcatcctgttttactgaatctctgcctcagttgctttatttactgtatacatacatagctcttttgaagacttgatgtcaaaagtaaagaagttcagaacctacggggcttgctttgggtcccaaattatcttagctttctggaaagagaagaatctataatgtattctccrtggagtatctttactcacttgtgatgagatgtctgtaaaagtaatcagctccatacatctgggcatgatgaccctcaggcccttgagactcaggtgttctcagctcatggtgcaagttcccctgaaagaaagactcaagccaagcattcaatggttatgttccagatcatagtctcctaaaagccaggggtcctttatgcagggatggtgacatcagaagttaaaaggtctatgcagattaacgaggaaaaatgagggaaattactgtaaggtttttaaaacatgatagttatatatgaactgatgattatataattgaacgtgcctaaattgatgtagttctctgtaaaactagttggtgtaaggaaacttggtctttgaccatcaaggaggttgcagtttgtggcatggcacaaagataacactcagcagatatatagctatgggatacatggatggatggatggatgggtggatggatggatggatggatggataggtagatggatggatgcgtgggtgtgtggaatggtgggtggtaggtgggtacatagatggatgtatggatgggtgggttggtgggtgcatggatgggtgagtaaggggggataaatgaaaggcttgttcttctgaagggactctttacaaagagtctttgatcttccagcttcacgtgcaagagaatccccaaggtgagcttgttaaaataagcatattctgggtatcacttcctgattttctggttcagtaagtctgaggaggaacttggggaactttatcttttaaacaagtacctcaggttatcatagtagtcttgctgtcctgaatcttaatgcatctctatttctgctacatcttccatgaagttgattttgcagaaatcattctgtggttccacattgactgcatccaagacctattgccttcagatttacatcaagcacaatttggcaggtattagggatggacccagcagccaagtctttgttgccttaaacagatcccttgtctcttgtcaggacctccttccaggctgctcctgagcaagtctggatgtgacttctacctatgatccagtgggttgggccataaaggagctttggaaagggacagtcttagggtgaaaaagagggagaggcttgccatctgaacaggaatctctcccagaggagagaagagaagcctaggctttaatgaggacagccaccctgtggatgactttctgtgtgatgttatgtggaggtggcttcttttttctctatcccattagctgaattctgtgccagaaggaagagatttggagtcagcaaggcatccttttttttttttttttttttttttaaaaaaaaaaaaaaagaaggaatgtgattgtgaaggaagcaagaaaaggcccaaaggctctggacaagggctaggaggctgaggagttttacacattcataatttccttgtaggccaagcttactctcagggatgacagtcattttctaagaaagtgagattgcttcacattgcatttaaaggcttaaataatgtattctgtcagacaattctctgaaatggttttccaagtgaatgcatcagaaagtgccyagaaagaatgcctggcacaggaagaggagggcattcagaaaatgtgagctgcttgcatcagaatctaacttgagatgtatcattcctacggtaaggtgcacacacattaaatgtacagttcaatgaactcatacttatttatacaactgtgtaaacaccactcagatcaagacagagaacatttctaacacctcagaaggctcatctgttcccctttctaagcaagaagtaccatcagcattaagaggtaaccactattctgatttctatcagcatagttttctgttcctgaattcatataaatagtcacccagtacgcattctttgctgtcttgcttcttttactcctcattaggttgtgggatttgcccacgrtatttcattctttattgtcattcttctttctctgccactgccatcctaccaacagtttgtattatgaaaaattgcagacgtacacaaaagttgaaagaattgtactgtaagtactctgatatgcaccacctagattctacaattaacatttccctctatttgcatctctatccatttaccattcctcttgtctatccatcagtctatcttgattcatttcaaaataagttgtaggtcaggtgcagtggctcacacctgtaataccagcattttgagaggcagaggtgagaggattccttgagtccgggagttgaagaccagtctgggcaacatagtgaggccttatctcttcaaaaataaaaaaaattagctgcccatggtggtgtatgcctgtggtcccagctacttgggcagctgaggcaggagaattgctggagtacaggagattgaagctgcagtgaactgtgactacactgctgcactcaacttgggcgacagagtaataccccgtctcagaaacaaaaacaaataaacaaacaaaaagctaaataagttgcagacagcagtcgcttcactcctaaacacttaagcaggtgtgtcatccttgaattactgaattagagttcagtatttgcttatgctagttatgttagtggtatgctttttaaaaataattaaggtgatgtcatgataaggctattaagagccaacatgcattgagtatggactttctgccagacattgcactatgcacttaacacayagacacatattgttttttccattttaagatacagaaagtgggccttaaaggtgctactgacttgctgatatgctttggctgtgtccccacccaaatcttaacttgaatcgtrtctcccagarttcccacgtgttgtgggagggacccagggagaggtaattgaatcatgggggctggtgtttcccatgttattcttatgaaagtgaataagtttcataagatccaatgaatttatcaggggtttctgcartttttctcttgccaccaccatgtaagaagtgcctttcacctccaccatgattctgagacctccccagccatgtagaactgtaagcctgattaaacctctttttcttcccggtctcaggttatgtctttatcagcagtgtgaaaatggactaatacagtgaattggtaccagtagagtggggcattgctgaaaasatatctgaaaatgtsgaagtgactttggaactgggtaacaggaagaagttagaaccgttgggaggtctcagaagaagacaggaaaatgtgggaaagtttggagcttcctagagacttgttgaatggctttgcccaaaatgctgatagcaatatggacaataatgtccaggctgaggtggtctcagatggagatgaggagctcgttgggaattggagcacaggtgactcttgttatgttttaacaaagagactggcagcattttgcccctgcgctagagatttgtggaactttgaacttgagaaagatgatttagggtatctggccgaagaaatttctcatcagcaaaacattcaagaggtgacttgggtgctgttaaaggcattcagttttataaaagaagcagagcatcaaggtttggaaaatttgcagtctgattgtgcgacagaaaagaaraacccattttctggggagaaattcaagctggctgcagaaatttgkgtaagtggcaaggaacctaatgttaatstcgaagaccatgaggaaaatgtctccaggccatgtcagagactttcacagcagcccctcctatcagaggcctgaagtcccaggaggaaaaaatgatttcatgggcccagccctgggtccctgtgctgtgtgtagcctagggacttggtgccctgtgtcccagccactccagtcatggctgaaaggggccaatgtatagctcaggctgtggcttcagagggtggaagccccaagccttggcagcctccatgtggtgttgagtgtgtgggggcacagaagtcaagaattggggtttgggaacctccgcctagttttcagaaaatatatggaaacacctggatgccccagcaaaagtttgctgcatgggtggagccctcatggagaacctctgctagggcagtgctgaagggaaatgtagggctggagcctccaggcagagtccatactggggcactgcccagtggatctgtgagaagagggaaagtgaactaagctctttaaacctcatatgtttccatcagtaacatgggaacaatagtaacaattccacagagatagtattgatggttgaacaagatgtttaaatcactagtaaaatttggccagacacggtggctcatgcctataatcctagcacgttgggaggctgaggtgggtggagcacctgaggtgaggagttcgagaccagcctggtcaacatggtgaaacccyatctgtactgtaaatacaaaaaattagctgggcatggtggcaggcacttgtaatcccagctacttgggaggctgaggcaggagaatcacttgaacccggaaagtagcggttgcagtgagccgagatggcaccattgcactccagcctgggtaacgagcaaaactccatcttaaaaaaaaaaaaaaatgcccgccttattcagatacacagtctaatgctttccactagaagattctggcactgttagcatctctrgcataaactatgttactcaacccagttctgtcgtcgtcatttttttgtgttggctttgcccttcccgcattgtgacttgatcccatttaagcagyaacctctgcacacacaatcttttctctgtccttcactcagtgatgttataatatctagaggcttattgattatttgtttgattctattgtgggcacaggagcagttcttagattaacactattagattttcccaagcagtattgccgtggtttatacaattggacgaaatgggtgatctaatttggactcaatttgctccaaagtagagttggaggaaggagatgctgtgatttggttctgcacctgagaacaagaatggaaaaagttatctccaggtgctatctgtgtgcctcatcaattttggatacactgtgtgaccagctctgaggattccaagcttttttgcgtggcttcttacctatcagctaaagaacctagctttacttatccaacttagatattaaatcccatgatataatttatttttccgtgtgaaatatctcaggaacaaaaaagtcaggttgagttttctaaaggcactggtttaagaggctataggttaagaggagataacagacatgctcagaaacaaatcatttcctgatagctgtttcagatggaaccaaatggaaaacagtgcttctttccgtttactgtacaccccctatcctggcatctaaacatatttgtaatcatactgtctatagaagttttggttctgcttttgaccttaacactaaaatacccttccataatattataggcttttcatgtacatcgtttttaagatggctataaattccacttagtggctatgactgtagttttttttttaactcttcccctaatagtgaaaatttagattgtttctaaattttccttactataagtaaggctaaaaagtaacatgtgaatgttttgaatcaataaatatagtatgtattaataatattgagctatttcttaagattacattttcagaagtaagatcactgagtcaaagggtgcacactgtttaaaggagcttaaatatattgcaaaactcttttcatggtctgctgatatcactgaaaatggaggtctggattcaaatcacatgtgccaactgttctactttggcagaattacctactgctttgggcctcgggtactaaatttgtgaaatgggaaaaataatagttcccacctcatagagttgcagtggagattgaatgagtttgtagataaaaagcgtctgcgttgtgtctggtacatggtaaggggttcgtaaatactgagttatttcttattaacatttattattgtctccactggaagaagagcctgtagaatatgcagactattcaaatgcttcctttggtccattgttgtcctttcttttctcttctagaactttccccatagtcatgcatctgtccctgggttatctgatatgtgtttcagcctgttttcccaagtttacctgcctctctgagaagcccatcagccctgagagatacctggaaggaaagaggaaaatgcgtgattcaaatcatgttgcaagtggatgaatctagccccaaacaactgggaggcaactactcctgcctgccgaggcctttttttttttttttttttttttttttgagactcactctgtcacccaggctggagtgcagtggcatgatcatggctcactgcagcctcccgggctcaagctttccacccmcctcagcctcctgagttgctgggaccacaagtatgcaccaacatgcctggttaatttttgtggttttttttttttttttttttttcctgctgagatggggatttcaccatgttctccaggctggtttcaaactcctgagtccaggtgatccacccatcttggcctcccagagtgctgggattacaggtgtgagccaytatgcccaataccccctatgtagacttttaaagaaatacaggaaacagccaagactggtgtsattcagatttagcttgggagagtctagtgggtgttaggttcccacaggatgaaggatcaccatgaacggtcaggacctgacttaggaggactcagaagctggagactgcagaggatggcacagagttccaaatctttggggtgtgtaagagtaggagaggcaggatgggagaggatgggagtgatgccacataaatcaactctgttgcagcctccggggccacatcagtagctgcaggaggaggagggaacagggagacagggagcctttcttcctttcctcacccccagttctgtgtttatacttctcatttagcccataccccactatattaaaagaagatgtataagtgtatgtgtttaatctaccattccttgtggcacagtgcrtggtctgcatggcacagtgtgtggtctgtatggcacagtgcatggtccgcatggcacagcgcrtggtccgcgtggcacagcgcgtggtccgcgtggcacagcgcgtggtccgcgtggcacagcgcgtggtctgcgtggcacagtgcgtggtctgcatggcacagcacatggacatgattcatacatgcaagtgaatgagtgaatgggcgatttccagactatccagaaactgtgccccatagtcctacccgtaggaatccaacagggaactgtcaccaccgacccgaggcaggaaccatgtgctctgagccctggccattttgtgtagatggagataaattgtcattgctaattgccagagaccaggtcctggtggtagccaaactgttccctagggagttctcaccaaccttgcaaaatgagatggcaatcttcatcgtggatgcaattatgtttcattgttaaccatcacaagcaacgggacattatgatgactgttataagttggtttcacatgtaaactttgacctcagagcaatggggcaggcttttcccaaggaccctgttgagaggttcatgatggtgacaaaaagcacaagccccagctgccaaggaggctgatatcgggagaggcagaatgtgtcttttctttcttcttcctcttcttcttcttctttttgaaaccatgctcattgkttttaggaatcattagcatggtgaagattaaagctattggagatagcacagattgtttcattttattatgttcaattggattggatccgagccatttgcaaagtgcagtattaccataagaagggacttggaatgtttgtcacataatacttcttcatggagaaggcagtttcttaaagaaaaaaaaaaaagacaacttgaaatagcacagcttttttccactttcaaatgtataacaaaatagaactttatatttccagatggactgcctggaacccggggagtggctcagctaccaggcyccagtggccsttgtcttgttatttcctccattagagacctggcrtataattgtgggagggagaagccagtggagcagtcaggggactccctggctgtttctgtgtctggtcttatgggtctgggcaytgaattcagtcacaaaccctagcatgctcctttgctacctcaggggacaaagtcaagaaaataacactaggattgccaccctgctctctctctctctctcttttttttttttttctttttgaggaagggtctctctctgtcacctggctggaatacaatggtgctatcttggcccactgcaccctccayctccctggttcaagggattctcgtgcctcagcctcccgagtagctgggattacaggggcacatgccaccatgcccagctaattttgtatttctagtacagacagggtttcaccgtgttggccaggctggtctsaaactcctgacctcaagtgatccaaccgcctcagcctcccaaagtgctgggatgacaggtgtgagccaccacacccagccactctctttcaactagaacagttcctctcttctttgttgcatatttttgtatttcatgcaaggtgctgtttatgaacaagggagtttcctgcagctttaataaagaagagaaaagaaaagaaagaaaggaaaattcgcatgttgaaaacattgtactaatcaaaaaagccagtcacaaaggaccctatgttatatgatttcatttacatgaaataccccaaagaggcaaatctgcagaaacagaaagtagagtggttgccaggggctggggatggggygtggatggaggcatttgggattaacagctaaagatagcaggattccttctaaagcaataaaaatgttgtaaagttgattgtggaaattctttcacaactctttgattgtactaaaactttgaacactttaaatgggtgaattgtatggtatatgaatcatatctcaacaaagctgttaaaaaattgtatgaaaactgtgatgggattcaagtagtstaaygctcaaatttcccaagtgccctcatttaagtctggaccacgacaggaacccagatgtggcctgagtagcacatcgtggaatgggcctgtcacctctaccccacacatcctcctgctgttaatgccccctttgaaagccattagctcttttgataaccacagcacggtgttggctctcagttagagactcagatttatccctgcccgaatcattttctttgattctctgcccttccccactacagtgtaaactccatttggactytctctagttcactgtgaatggtttttgaataacatcaattagcataacctcatgcccagcatcgtccttattgttgagagcacagcagtgacaaaggtgcaactcttgctcttgagcgatcacagtttatttggggaacctggtactacctaataaaaccaggggagactcgacccaaggcattgtgtttgagctaggctttgaacaatgtatagaccctcaccaagtatggaagtggaagagtaagacattcmaggtagaaggaacagtatgaggaaagtcagagagctaacaaagattatagtgtaatgccagaatcatgagaaatttgctgagaattcatttgaggccataatttaaaaagataggaggagccatgtgtagaactttcacagaacagtgtgtacctcccctccttcttccttattagtcgtgattcttggggggcaactaaacccagcttttggcaaaagggagtatgttggttcatgtaccaggaagtcttggagtgatggcttcaggcacggctggatccaggggctcaaaaatataatcagatgatttgttygcttctgtcttttgctatggtggtctctgttttgcttacttctgcagcagattttctctacctggtgggagaaacagctgccagaaaatccagattcccattctcatgctagcttcataacagcaggagagctcctcactctgtttcccagggtgtrtatatatatgtatacatatgtatatgtatatcaatatatatatcaggtaagattctagtccagtgtgagccatatgctttattcctgagcaatcgctgtggtcaagagatagactttttagggccgggcacggtggcctacacctgtaatcccagcactttgagaggctgaggcgggaagatcacttgttgaggtcaggagttcgagaccagcctggccaacatgstgaaatcccatctctactaaaaatacaaaaattaggtggcaggcacttgtaatcccagctactcagaaggctgaggcgggagaatctgttgagtccgggaggcggaggttgcagtgagccaaggtcacgccactgctctccagtctgggtgacagactctgtgtcaaaaaaaaaaaaaaaaaaaaaaaaaagagagagataggctgtttaacaggtgtcgtaggtcatgtatctacagccatggaaagagaatggagcactctaatggatccctgacgggtcaaatggagcaaagtgtgcttcccagaagagcataagaaaaaggaagggtactgggtggaccaaatctattgttacaatatcccttatattccttagggttcctttttttcaagttaaagcattgrgtcatgtctctgataaatcgcccccccaccccgatccccaccctctgccgcccyggccttctttttgtrctgttgggttccaaactttacctgaggattttcacatgcacatctgttaaatgccatttaaagagaacactaacaagagaaagctagttcatttytcttcctgggacctcagtttcctcatcagcagaatcgggatattagtgcagaccttgcaggctctttatgaggatccatcgggagcctcaggcgcacactcggggagcattggagctcttcccaggccgaggtaggagtttgtccacctgctgtttactccgaaacttcttgctccacctgtcactttagaagaccctgatctgccggaaggtctccccgtatacccagcagcccagacctctcaggaaagagcaggctgtcgtcctgcattggaggaggaagcttggggcaggtggcagagcaacttcatttccagatgaaactgggctccctggccatcagctgccgtgcttggaggggcgttcagacaaagagccaaatttaaattcatgtaatgttgctgtttgtaacattgaatacttaagacatctgctcagagtctcgcattataaatgaatggaaaggatccaggagggctttattggatgggagccgtgaagtsagcgccrtgtatttcaaagcaggatcttaatcagacattatttatatctataatattttacaaattaaaagcagtagaaatagtcactggaaggaagtcagcaagcaggggtgaaaaaaaaaaaaaakaaaagaacctgaagccgccaagagaggctcactgaccatctctgggggaggaagggtgaagagtagcaaatttaccgtcatcagcaggtgtstaaatgttccatttamattgaatggcacatgtcataaagtacataccgctgcacatcccaccctctgtttctgtttcaactgcagagcctatttttctttcccttccagctcagctgccttctcctccctgacytcaggtcacccaagactcccactttatgatttccttttacttttagttcattattctctgtgattcagtggaaacataaaaaatggtttttaattttaattaatggcaaacttagaacagacccatttaataaatctgtcctctgaacttaacacgtctccccgccttgtaagggctgcctgtcattttattagcgctggagcctcccgaccgaagggctgagtaattgacaaaaactgcaggtaaggcaagagrccygtaattgattcataagatcccttcctccgatcgcattgaagagttaattatttttcctgcagttgggactcagctgttgtttccactgggattaaacagctgtcagcattgttaatgacatcaaattcatgcattaaaatcctctcattcccttcccgtataaggtggggttgcggaaatctctgccacgtccgcctttatgaaggagtgaaatcctaagaaagataaaggcccttattacaaaaccacagaccggagcttgtgttgatggaatctcgtaatgagtaattaagccgctttgcagaagtccgggctgtcatcctggcgtttgggtacttatgttccctagtggagacagccgggtagactggggaaggtgataaaagggagaaaaatagaactgttctagaacgatctccacttttaacagcacaatacagagaacagagctactcaataattagccaaccaagtatgaattctcatatgttcttaaagtatctgctgatttcttcaaacatctctaacaacatgtctgatgaatacgaagcctccctttatttatttattttctttttgctttctttttttgggggcagggggcacagtttttctttctgtctcagtctctcaaactgtaggaggaccaacttcagggttttattttgtttgctttgctttgccttgtctggtttttcaaagtgctcttttaacaaatgaaagtttaaagcttgagttcaatttgagtaatttgttcccagagaaraagtaaatgaaaagtatttctgggtatttttaatgacacaagtttctgtgctgatatgcgggcaggggttcrggagtgggggcaccagggctcatgagccgagagcccctgcttcccttggaaaacggaaatttctatctccaactagggaaaaatttgcatgtgtagaattttggttttttsttcggcgtgtttatttaatttaacattacctatcctacgattatttcaaggtgattttattactagtcagctttcttttccctagcacaaaactcatgcaacatttatgttgaatgtttaaaattcttttctaaatggtttcacctttctgaaaaaatcttgcattcaaaaagtgtaaaggactctcctcatttctgcgcttgaaagtgcagtgtgatttcacaaatcaaacaatatcaggaaaattcaatctcgttaatacttttggagggaaaagaaggcaagcgtactcttcagagaacggattcttttggatttgtgttagagaaaaactgtstctaatgaccgcacagcacaaagcaaagcagttaaatgaataaccgccttccagtacagataataaagcaggagaattttgtgtgtcacatcaataaacatcttaattgaacagcacgtgggttcttccctagtacctgccttgctatacactagccttggaaagagtcttggtaaattgttcagcctcaagttccacaacaaaatgggattctgttttctagaacctggcctagttatgatgtgatgaatccgtctctgttaaggttatcaactttaataaaccatgtattatttccttaaatattgtgcaatgtgcagggaattattgcagttttgttttttatttagcacaaacctaaatattacacgtagcaaatgtcacccgatgcaactgtctgtcctgaagaggaggayagattattctgtggctacctaatggtgtttacagagttgccactttgccaaaccccaagasccacacttggtctctggtgttgggtccgccagctctccacccttcagaatgggatgtttagggcgtaatcttctgagacccacaacctaagccgggaagcagaggcaatttattaccccagcttcctgtccactggaggcccggggagaccktgaaatgctcagctgcaagtcagggtccaccgatgcagcctcggaatttaatgaggcctctccggacccaaagggagatggacatttctaggcttgtggaagggactccccagcccctcttctctcctggtgagaccgttgttggatgtgaaaaggccttcactattgtcaaggctgggcccctgcttttgccttgttactctgcattttaactstggaccagaattgattgccaccaataaaagatactccagtccttaaaaagtcaacattgttatgttttacttagttatgacttagtgaacacctatacgaattagcctcatctggttcaagggttctcagatgggaccacttttgcacccagggaaggtgtggcaatgtctagagacatttttgattgtcataacttaggatgaggtaatagtgtgctcctgatttctgggggtagaggccggggatagtggttaacatcctacatgaacagggcagacccttgcaacaaaatcttacgtggtcctggatgaaaataacactggaggtaagaaaccttggcctagagggttccccaacctttttttttttttcaktatggccccctcccccaggagccttttgagatacgactttcctaatggtctttgcccatgaaatctgaataccacagatgtgctgaatgcctgttcgtgtaccatatacacatggtatatgcctcgtaaatgaaagggtgaacagtgtttattccccaactgtcgtccctcaaaaccaatgttaacacccctggatgtattgtcacccctgttgggaatacaccgctcagagaagggttttgtccataggcaacacagagccaattgaggcctttgggcaagcggaggtcawgatggaattcagcctttcagacaattctgccaggcccttggagggtgggaggaaacaggcaagacctctggctcctagaaccrtaaggacccttgccattaggascaaacctcttccagctttctcagcagccacatgtcaccccctcttccaccctttgccctgccaccctccatcccctgataccctcctgccttttagttgccggtgcttggaaacctttgcaaagtctttttatggagatgccatgtcctttcaatggtgcgtttagccagcgccccgctctgggctccagcaacattagggcattgttattccatccgaatgacaatttcaagctcacgtctttgttgtccatcctcgtatatcctgcaccgttcctggcacagagtaggcactggataattatttcttggatgaaagaatgaacaaatgaatgaatgaatgaaagtttttttccttgcaaatctccctgcacactttaatcttaccagcatcttgtgaaacactcctacttctttctgatctttatttcttacgtagttttgaaatgagaaccgatgaagctgcttttgctcatggtacctcaggtcctcgctcactcccagcactcagggctgtgtggtcagagtctcagattcggagcatgtgatgtgcgtgggcctgtgactaacagccacatggcacgcaatggtggcagcctgggaggctgactgagcaagtaatttctgcttaagcaagaacgtgaggggtgatgtagttgcatgcactttgccatcatagcttgatctaggtctcagcctgggatcttgcagctgcgaaaagcatggcgttgcgtttccaagcctgaacatccacacccgcgaagataagaccatctcttggattaatgtgacgctgaaataaaataatccaaagagaaaatgcctgagacccaccaggagctcaccagatactacttctatcttccccactctaggtctttttactgcaactaccgtttaaaatactttttccatgaggcagatcttagtgctgacagtgtcagtgtctttaatgcctggttcagttgcaaacatggagggcagaggtttgatagcatccaaagtatgcacgccgcactccacctcccatgcccttttctttttctcagggccatcagaaaggaagtaactggcttagatttgacacctctttttttgktcgttttatgtttttgaatctagcatgtataagctcatcagagagctttcccctggcctgggacaatcaggtttcaactgaggctcacgcacacgtcaacacaggaacctttttgatgcctccaggcaatttcctacaagctctaatatcttcctctttactcccatatgtggtatctctggtaccctatatatcattcactcaastgtttgttttgaaccacttattttggcaagacttcttcagacaggagagccctgagagctcttcaaaggctgggcctgatggtgtttgtcagagaggttygagctcttaaatttaaatggcctcccacagggaagcagaagtccttttggatcctccagaggactgagatcctccagatgctgttcatttgccttattcgttatgaccatagaagtttgtggggtggcactctttattctgtcctcgccccgcaagcaaagcacacaccacaagctataaggagatgagctcagtaggcctgtcctttactttattttccctattagaatcccaccatagacgccctctctgcatgtgtccttgtctgggggagtcgcttaatttcctttttctttgaggggctataaaatttttgttgttacaaaaatgaaaggggagaggagatagaagaaggaaaacagtgaaagctcagcctcgaaagaagtgcttaaaggaaaggaggttctgacagagggctcggatcatcagcaggggcagggggtgcagggggtgcctgcaagtctgtgaccgtcctgaaggacccccttcctaggatcccaaacatgcactcccatcccagcctcacaccaagctcccatctgggaagcagcagacacacataaaagcaaggaaacttcaaggacgctttttgttttcccctacttttaaaaaattgaggtgaaattcacataatataagattaaccatttcaaagtagacagttcaatagcagtacattcacaatggtgtgtaaatacygcatctathtatttccaaaatatttgtatctccccacaataaaagtctgtaccaattaagcagctactacccattcctcttccctaccattctaccttctgtctcagtaggtttgcytatttgggatattttatttaagtgsgatcatacaatagcatcatgtgttcaaggttgacccacattgtggcatgtatcagtacttcattcccttttatcactgaatagtattccactgtatattgataccacagttggttgacccattcatccatccatgggcatttgggttatttccacctttttgctcttgtgaatccatgctgctgtgaataattgcatatgagtatttgggttcctgtttttaattatgttgggtatatacctaggagtggaagtgctgggtcacgcagtaattctttttaactttttggggaaatatcaaaccgttttccacagtggctgcaccatgttgcattcccaccagcgaagtgcaggggttccagtttctcacactgtcaccaactctgtcagtctattctggcactgctataaagaaatgcctgagactgggtaatggctgaagaaaagaggtttaattggctcatgattctgcaggctgcacaggaagcatagaagcttctgctactgggggcgcctcaggaaacttrtaatcatggcagaaggtaaaggggaagcaggcacatcttacatcgccagagcaggagcaacagagagcgactggggaggcgctacacacttttcaaccaccgaatcgcatgagaactctctcactgggacaacaccaaggagatactgctaaatcatttatgaagggttcatcctcatgactcagtcacctcccaccaggccccacctccaacactggggattacaattcaacatgagatttcggcggggacacagatcyaaaccttatcaccagcgcttgttatttcctcaggtacattttgatgtccctccccactttactctcccctacaccttgaagcaggtgcaatcattttaggctatgaggaccagcatcgaccttcatcagcatctgctctcctttacggccaggtctccttcgtcctccctgctcagaatttcagtctttttttttttttttccctatacagacacaggaagtatatattttcctctcgaatatcacttgggtcttatcttgttttatgctacatgcatgtggcttcccccgttacaaaaagaattcacattattagagaacatttggaaaacatacagaagtaaaacaagccatccccattcccacctcccagagataacgcctgtgttttagttcatctccttctaacctttatagttttttttctatcatattagttaggcattggtttggctccaagtgaaaactgcttctgttattaacatcagcagcagcaacaagaagagagaagtttatgtctgtctcggaatacgtaygtgacaggctcccccatcgaggtgctcagatatggtggccactgcatgattttgctcaggactgaattagaggcaggtgaaaggccctcactccctggaatcagctagcgatggctaaggctcctgtgagggtttctacagaggttccacccagagaggagagtcaaatgggagtttctaccgatgctcttgaaaggatcttgttactcagatgtctctaagacaatgatcagtacccatctctcagagcctgtgyagccgtccatgcttgaggcatgagatgctgaagataaaggtccccagtggtccaggtttttccttctcagcttggaaagcagcaggaaaactgcactgcatttatccaaagggtgtgattggtaagtgtgggtactgatatagaataaatcaacgtggctgggtgcagtggctcacgtctataatcccattactttgggaggccaaggtgggtggatcacaaggtcaggagattgagaccatcctggctaacatggtgaaaccccatctctactaaaaatacaaaaaattagctgggtgtgttggtgggcacctgtacttccaggtgcttgggaagctgaggcaggagaatcacttgaactcagaaggccaaggttgtagtaagctgagattgcaccactgcactgcagccttggcaacagagcgagactccmtctcaaatcaatcaaccagtcaatgtgtgcccccttttcctccaactcccaccccaaatccttgctgaatcatacctatccttcacctttataagcatctagtttttaaatctttgctgtgaagttggctgtgtgagctccatttgacagatggaaaaactaaggtagtttgccaaagatggctctttgccttcaggatttccatgtctttattttgagtaaacacttgcactgctaattttattccaacaatgtccttggaatggttttagttctcttggctgtaaccaagtctacacgataccacttgaattgacaacatcacagtcaaacctcaattttcacaattaattgtgccgcagttaattaaattgactgcctggcaatccagtctcaattaaaatactaatagtttatttatttattttgtcttttacgaagygttttcttttaccatctctcaggatcctatgtaggtatcctgatggtaagaatgataataccatgactgattattccatagttgcaggaaccccacatggcatttcaaatcacaatcagaactttgaccttgaaaggggacccggatcagctccattctcccaaggagactttagctactacctttcttactttttgaataagtattttgcagggcttattttcatcatctggaaaggaggaatagatagggttatcttgaaagtcctctcttggaagggattatggttctgtaatsctgtaggactggactcagtgggtaaatgtagaggtgatggtatctccgtttttattgtcttcagaaatgttgagatcgagtgatataaagtcacagggttggccccacagtttagttcttggcttatgtagaaatctgtgctaagaagcgctgtgttgcgtcatcatggggcatttttgtatgtcatgcagtcatactttgcagacccctgggagcctcattcgagttcttcctgtggagtcccatgccttggtgttgaaccagtgtcctagctgggaggaccgttgtactgcagcrctttcctaaactctgcatgtggtctccatgatgtcctggctgtgttagcatcagaaatggctttgcccacatctcccaactctgccctcttattaggatttctctgcgctggctgatgcctgagccatctaatgatctttacgggaataaccaaaaatgctgggtggggggggaaaacgccagcagatctctttagggcagagtagggagggacacggacaatgtgggcagctgtccatgcagcacgtatcacatccaggatgatgtttatatgaagcatcatttttttttttttttaggtggagtcttgctctgtcatccaggctggcatgcagtggcacaatctgggctcactgcaacctccactttccgggttcaggtgattctcctgcctcagcctcccaagtagctgggagtaaaggcacatgccaccatgcccagctaatttttgtatttttgttagagatggggtggccaggctggtcttgaactgctgacttcgagtgatccaccggccttggcctcacaaagtgctgggattacaggtgtgagacattgtgcccagcttggagcatcttaatttaagccctctacatccctgcacggtagatacaaccagctccgtttccaaggacgaggagcaacagagtgaggtcatttccctgagttacactgaagatggtctaatttcaaagtccttcctgtgtccactttgccaggtgccccccgaaaagcaagaagactccttcaagcatcctgaagatttggatgctacaactgtatgtcctgctggagagaccctcccagaacattgaaggctccagtgttttgactggcagaatctcagtttcaacatctgtctctaagggctctggacctatgctgggtgaaacgtgttgtctgtaggatttggcccatctgagcctcactggggatgggctaaactccgtggggtttgtattccttctccttcattgctcagaggaaaagaagaaaaaaaataaaaagaaacgaccccaaacagcctctttcgtgcacacacgcctaagaaataggaacatgaatttgcattccttccaactggtgtgtttccaaaatacagacaggcaagtttgaatcactttgactttgaaagcgtgattttgagcaattatctggggaaaaaaatacctcctcttcactaaataagtctgtcaaaaagagtcatagtacagcgtgccattgccagaatacacgtgtgtgctggtaagctggccccaaccaattaaatagtgaaatgtcgactgcattcaggcccttcctggtctgcagacagacttgtgttagttcattttcatagtggtgtgtatgtatctttagactttaactgacagattcccacagtgagtagagtagggagttatcaattacatggttagctaggcgctgctattgtatgctctatggcttcttgacaggagcaggcagagaaggagggaaggactaatatttctggtgcaggaggactgttaatattttagaccgggctcctcaaacatgtatgcttatttagtgaggagaaaatgtgcatttgaatcctgcaaaccctcgagaagtttgcattaataaatagtgattaccagaatattctcttctaaaatatattttatttatcaaatgaatacccttctgagcccctctttatccttcctgtgatggctaaactaatttcatcaaattttgatttctgtgtggtgatgttgtgaacagtgcctgaaataataaaattaccctgagcagattgcatataaaactgtttgcaatgggagaagcagtctttggggctgtggtttcctttggctgcagtgtaatatattcctttgtttcttttgtgaagtatttattgtgggtctcctgtagtctgagtttcttgtggaagtgggcttgtgttttgcttttgtagactgacactgagaatagcatccaaacatctttttcccaccaaggcatcaaactccatcrttaggaattccttcatagaatcaaagaatcagaaagagctgaaacatagaccacggacactcaaattgtttatcctgaaatgaatgggaaaacctaagctgaagaaaggaagtgtctggccaagaagctggcgggagagtagaatcaggaaccagggcctcctcgtatctggtctcacgcttcttccgtggtgttctttcttaagttgagcattgcattctccttggataggatggatattttcctgggaaggatgatacatgatgtatttatccataaaactgaacaggtgttatgtgtgccttttctaataggaaagaccatcatgctatgaaaagagaggaaggggagaagaaatggggtacgttaagatctcagaatgagttgtggggctaaatgttcagcctgtctcccttttctccttgccacaccactagattatattttctagactctcctggtgttagatttggccttgtgacttccagccaatggaatcggctgcaggatgaaactagtcttgatccctgaatgactgcgtggagcacatctccttctggtcaataaggcatttcaggagtgagagataaacttctattgtgttaaacccctgtgactttgagacatatctcctacagcaggtggagttagcttaactaatgcagaacgataggactggtgaagcagtccatctgttatgagagctattctttttttttttttttttttttttgtgagatggagtcttgctctgttacccaggctggagtgcagtggtgcagtctcagctgactgcaagctccgcatcccaggttcacgctattctcctgcctcagcctcccgagtagctgggactacaggcgcctgccaccatgcccggctattttttttgtatttttagtagagacagggtttcactgtcttagccaggatggtctcgatctcctgacctcgtgatctgcccgccttggcctcccaaagtgctggcattacaggcatgagccatcgcgcccggccagagggctattctttgtcttttatttgctttgagtctggtataaccatgtggcacatacccctgtacatgtttgccaagactgctatatggtagagcttggaattcttaggagctttatcaggtaattgcaagtcccccacctcyaasaaagcactctctaggtcaagaatcagcaaatgttttctatagaggcccgtaaaattaatattttatactttgtgggtcatatagtctctgtttcaattacccaactctgctgttgtagtgcaaaagcagctgtagacagtaagtgaatggatgggtgtggccgtgtgccaataaaactttatttacaaaaacaggcagcaggccagaattagccctgtgggatgactcacatgagcagagagttctggcatcaactttgttcggagagatactgacatacttctactcaagtaagtcaatgtttctgtctcaactggttgattggaacaacatacaaactgacccttaggaaccttctaccaaaaatatcctgtgaatcttcatacttttgtaatagcgtttagttagaagtggtcagactttcttcgtcctcttttcgtgatttcctctgtggtgtctgtggatcgataccggcagctcaggtaaggaacgtgtgcaggggatgtaacagaaaggagaaagacgaggaagaagggtgcatggagcgtgcaggggaagaactgattcttttttcagttaatcggctcatcaaggttctggtgttgaagtctgatttcatttgccatgttaagaggatatggacagatactgggcaaaaggaaaaaaaaaatattggatccttgcccagctccaagtgttgctgagtcccttgccccctccaccccgctctgtcaggagccaagctctggccgcccagtttttggactttgtaactgtttccgaacggatcagattccatctgaattgcagatggctttagccccagcagcagaggctgccatgacatcggcatgcgatttcttccaggacttaactctggagagagctccatttcctgttgatcatgagggttttacaggcacaaacgctgtcttctgtcactctgtcacagtgcattatgtcagaatagaggaagcagttcagcccgtaaatctgtgccaccggcacgcagggtgttgtgttgtctccaatgtgccttgtcaacaccacagggctaatagcagtgtcagggtccccgtgccatgaatcacttcacatctctggctagtacagatctctccctgtcactagtggaagtcgcctgcactacattcagaataggggccaggcgtggtggctcacgctgtaatcccagaacgttgggaggccaaggtgggaggatcacttgaagtcaggagtttcagaccagcctgacaaacatggtgaaacccagtctctactaaaaatacaaaaattagctgtgcatagtggtgcatgcctgtagtcccagctactcaggaggctgaggcaggagaattgcttgaatccaagagatggaggttgcagtgagccaaggtcgtgccactgcactccagcctgggcaaaagagtgagactccatctgaaaaagaaaaaagaataggcacagacaatttacctggatcctcacattgcaatgctgaccactccggaaggagtgtagaagttgcagctcatgcctgcattccaaatggctgccttctgcagtcccgtcagccaggatccctctcatacaaacaccttgactggccgagaaatgcagatgctgtgtcaaaagttcatggctcagagccaacaatgcactgtgctgacctccaattttccttgaggaggggcatcccagggtcagaattttatgcaatgcaagcttgtccacgatggcatgggagcgtgtgggaatgtcaagatgaaccggggctccgggagacatttatggagtcaggagcacacatacattcctggttctgtcagcatttccctaggcgagatgagtcacacatttatatttttacatatgcagcgcgcttgcaattttccactggggaagatagaaaaacttattgaaaatagttaatcagttttacaaagatgccataggtagaggtgcttccagacctatagttttgaaagtcacctagaggataccagtctgactcagagctttatgaaggcatattcctaatatcctccctgtgctccacgaagaacaattggtttggacatgaactggtttccatttttagactccaggcccacagtattctaagtaggttggggctgtgctgattgtaccactctttggattttagtggattttctttttaggatttcatgtaagtaacctgtgcagagagtgaggataaataagaacaagaatgacaaaccgataggctacttgacatcattccttaattccaggtcactggcggacatcactcattcatcagtactctgtttttctcccaagaatggatctgactcttgaattctctttaatagagtgttctgggaggctgttaccaattgaccagggttgatgcacatgttgaaacatctttgccatttcttgatagcttcagaagagattttaaagtactattattttgatgttgttagctttcaaagattaattccacagagatttttgggcatctttttgataatacacattatgcttgacttgggagtttcaggatgcgcaagagactccttttgactgcaaggactcagtaaaacaaagtatttcaaggtcatgctacaaaaagtcccaccaagagcatggtcaggaggtacagtgcacttacccacacggatcagagagggatcagaggaggctggctggggaaatgatcctagggctttcttaaaggacacagcgccatggttatttaagtacagcttttaaggagaactaacttgccactttgatagcagtataggactccaatatttctcatttgtaattttcagaagcacacgggaggtctttgaaayttaatgtctccctgcatcacaaaccaaaagacgagtcagtttataagtaggctgtgcttattaactcagtcctggctttattgattgctttaggttccatgatctttggcatgtgagtggttttgctttgttttgacaatgatctttttgtaccttgtatcgggtaggttggaatgtgtttgaaaatttaagaatattttcctagcaaaggcaggatttttcaagtttgttcatgctggagctcctgccacgtattttgtccttttttcttttttctagcaactctcgagaggatgagacaaatggattgtgaaactggaaggagggtttctcattttttaatccattgttttagtgagagtttaaagctttcctataaaatatgtgggttgagaaaaattggaaaagacctcttcaaggactttcctctatgctccctcatgtttcaagtggcttttttgcatgatggtgcatatgtctttgtttctgtacagggccctccatgttcagaggcagagtaacgtgaattcatttygcgctaatgagagttgcgatatgtcggcccaaactctctgtgtccttttcttcttgggctgatgaacttgtcaacttttaaaaaatgtgctctccaaaaatttccagcaggactttcccaccttgctgtttaaacagtgaatcagccctgtgggctttgctgcttacaacatgattccggtgaaaccacaggtctcgtcatgtcccttctgtatccatggtagtcccagtgggaaagaggtaacaaacccaaattgagtaatttcaagaaattttaataacaaaggggctattttataaagggggggtggtcaaggtgtagggaaacataaaagagagcgaatttctggtctggtgctgtgggtcacgcctgtaataccagcagtttgggaggccgaggctggtggatcacctgaggtcaggagtttgagaccagtctggccaacatggtgaaaccccgtctctactaaaaatacaaaaacttagctgggcatggtgacaggcatctgtaatctcagctmctcgggaggctgaggctggagaatcacttgaacccgggaggcagaggttgcagtgagccaagatcacgctattgcactccagcccaggcaacaagagcaaaactctgtctcaaaaaaattaaaaaaaaaaaaaaagaaagaaaattaatttctcagaggtagtaataggggtggctgtcaccatccttggccaaggagagggagcagatactggagacagttgaaggtgccaggatggagaagactccttggaaggagctgtaacctttggttgaggaattcagcctaccactggtaatactccctctccccaggagaggtcccagcggaataaacatccccgccccttcaactctttgccattgttcaagccctgctagaaaccagatggcaaaaggaagttactgatgtgttcatattggtcaactttttcaggcacgaagaccagtacagaaggatggaaagtgcatttgggtagggaaatgggagattcctgcatagctgtcaagttagtttcttcccagagagaaagaccggtggctgtagtctgtgccccactcccagcctgtcctttctcagccgtggcttgtgtgcatccctggggccrgcatgttgctgcgagccccaatcgatcagtggagaaacgagctctggtgggcagtcaggcaaagcagatacacgtgcttcttttcagctttgttggaaggtttcattttgcttcasgaactaggcaggagaattcctgagttcctgtacaacctgagttctctgttaaaacaaggaggaagtaatcatcctgagttcgatgattcagagtaagccatttaacttgtagagctttgggactaacaatgatccctttttggagtccttaattactaaaattatcagcatatttagagttctgaagwtgctgaacccttattgtatctccccagggttagtgagtaattgggaatagtgttccatcttggatgcccccatccactaaccagctttcctcttcgggtggttctaagaattctaattcaattagaaggccttctttttagtttgattagttcaatatcaagagctaaatacattagcttatatatatgtctgatgaactcatctttgcttccttggatccccaagatagaatggccctaatgcagtcaaaccaccctgcagaatcttaacagcaccacaaatattgcatccaggcatcctgcccatgctggcttgcaggctggggatccctgtccatagcgcccatggctccaccaccagtcaaaggtagtggggccagcagtggactcctgtgtggttcagctctcaaaaatgtgaactgaaagacacagaaaaagacttgtgtttggggataaatactgagactgagcagtcttgtggattcaggaattgggcatccagttgggaccctttgcaagaagggtgttagggagcagagagcatgagtaagccggaagcagagcaggagagagaatggagcaggtgtgcaaagagggcggtgagatgctgagagtaatggggctggcccaggaggaagtgagaggaagcaaagtgagacagaggtggtgtgtgagcgtgtgtttgtgtgtgtgtgtgtgtgtgtgtgtgtgtgtgtgtgtgattgagagagagagagacrgatggagggaaagagaggcgggggattccaggtacagtggctcatgtctgtaattctagcactttgggaggccggggcgagcaaattgcttgaactcasgagttcgaggctagcctgggcaacacggcaaagscctcatctctacaaaaaatacaaaaattagctgggcttggtgacagacgcttgtagtctcagctactcgggaggctgaagtgggaggatctttagagcccaggaagtytaggctgcagtgagccatgaccttgccactgcacaccagcctgggtgacagagggagaccttgtctcaccaaaaaaaaaaaaaaaagagagagaggttgagctcaactgatcagcatctcagattaagggcctccattccccccatgctttgtaattgctgcctgttttccatgaagcctgactgtgcattggttctaagtcatgggctctgcaagatcctccttgtgccttgagaagggccctgtccgcagcctgaggagcctcaactgttctctgcacgacctagttctgggctagggaatggctgtctagcttcagtggatttccagrgtccggagctactaaaggtcaacagctgtgttaytgcaaactctgtggcctgcattctatcaatgccaaaatgcacatcacactgacaacagctctttgtttacaccggggagcccccaaagccccagggtaattccatcaccacccaagttktaagatggtagagcgaacaggccagaatgtgataaagtaaaatgaaagaagaaaaaggaggaaggaaaaagagagagggagaagcasatagaggaaagaaggaagaaggaaggaggaaggagggagggagggagacagggaaggaaggaagtctggcaagagggcacagtcagacctgccaggatccctctgctgtcttaatcaagctttgcctcagtctttctggactgaatttgtctctgtgttcacttggcattttttaaaaggagacaaaacaggtgatgaacacagcatgagtgatttttcccttaagagagaggtgtcatgctgagaaagaagaaccgacctccaggggagcttgtcttcagaccaaaaccctggcaaggacagcctgtttggatcttggtcattttgttagatttataaagtgcctttgaacagagcaggacactctggggacaagtcaaagcatggcagccttcagcttcccaaagaagagttgtggagaaggaaaagtgaaggaaagtaccttactaagtcattgatggcacattcagcccttgtcaaagtcaaagaagaaatytggagaaattctcaccactgtgcttaggagtcaccctgaactatttcttggatgaaattaccaccctcccacttttggcaatgagacagcaagcttggaatttggagtccatgttaaatccaggtcccagccaggcacagtggctcacgcctgtaatcccagcattttgggaggctgagatgggaggatcacttgagcccaggagtttgaggccagcctggtcaacacaaggagacttcatctctataaataataaaaaaattaaaaattagctgggtgtggtggtgcacacctgtagtcccagctactcaggaggctgagatgggaagatggcttgagcctgggaatttgaggctatagtgagccatgattgcaccactgcactccagactgggagacacagcaagaccttgtctcaaaaaaaaaaaaaaagccagattctccacctaccagtggtggggccccttgggtaacttgttttcactccctcagaacctcagtttcctttcctatacaacgcaagccataaggttaacccctcctcgtggtgatgttaagatgaaacaggaaggtgaggggcttaacacatttccgtgttcccataagctttcaggagatcttggtagttttcatctcggtcttcattaccatcatcactgcttcagactcctgtccatgtggggccctgtggtcttgcgatcacctccataaatgttcctttgttcccgcctaacacaataccagccacaaaataattctcaacacatattcattagtggatgcaggggcgaaatgaaactcagggggttgggaaactcacctgaaggatcttctccctctccccactttcaggctctcctttcacacgcatgcattaattcgttcattcttggaatctacccacctgtgatgtgctagttactaaagatgcagcaatgartgaaaggtaatcctgtccttgaggcattcacaggtaaagaagcctgcttgggacattgggccgtgagctccaacaatgtcactattcttctaggctttgtggacctttggtcaccccttctgtaagaccaactcccttatctgcctgtacagtgttctgcgaatcccggtctctactaaaaatacgaaaaaaattagccaggtgtggtggtgggtgcctgcaatcccagctactctggaggctgaggcaggrgaattgcttgaacccgggaggcagaggttgcagtgaacccagattgcgcctctgcactccagcctgggcaaaagagtgacactctatctcaaaaaaacaaaacaaaacaaaaacaatttggctccagtgagctcattttacgttgtatgtaccagtatgcaagtgttgtatgsatgtgagcgtctgcgtaggtttttatttttctctctcagaatgaaaggtttgattcgtaccagctccccatcccttcccacgatcccatcttaatgtctgttgtggaagttggcccacagaagcctcaaggctaaccaacaagaaagatcacttcatatgcattagctggaaggtaacaagaggaaatcgcctgccagggtccctgactcccggaggaaagtgtcctctgagccctccttgagggacataaatagccccaaaagtcactgaatgctaagttggctttctccccaaaccttctaagtaggcaatcaggatttaacgacccgcaaatttccaattttttagtttatgaaaaaatatatctacatataatttttgcctccattagagtctcatctttaaaaaaaaaaattattcagtgacttcctccctctctttccaatgaggaaaactggactatttatgctgcattttaggctttttttcatatataatttttcatataaatgcacattttccccttctttcggggaggaaatttaacttttgtggaaatgtgatgtgtgtttaaattaccaatttcataggcaatatgtctgataattgcagagagatactgagttaacttgtagcaatgagtttctgtgacaaagggaaatcagtttgtttgcagtaagccgaggataacggcgccgaaactttactatttgggggtggggggaggttggggaagggaggccctgaaattgctttttataattaaaaagggaatctcagatgttttatatcttgaatatttacaataaaacctttaagtgcttgtcaagagggtaatgtgtcattaactggggactctgcctcgcctctcctctcggacatgacagtgcggctggataagagaagagtaattatagttcagcagggctgccaggtgtgataaatgactaatcagcacgcaggagcctcagtcctcaaaggaggactattacagtgttatcagctgcgggcctgggtgtacggagccccgaacagggatggggacaggaccttgcgctgtgcggcttggcatgctgctccagagtgagcccatggctgtctcttagttttgtcaccggcggctttatgtggctgccacggggggacaggaaacacacaggggctccagcaatctgcctggtgctaatatttatataacacactcgccagactccatggcctgagtccgggggtggcttttcggggtgcagcttggatggcatcagaacctgcaagaagccaagacgcctgttctccacggcggagcccgctggtcggtcactcctgttcctttcgtgtccgttgggtgcaggcattatttccagtgtatgtgaccgcttcccccgtgggaacagtgtggcattgttccctgggcaagccaacagctcagccctgtcctagagaaccctggagctacgacgagggtaccctggacccctgtcctaaatgttctttgactctgcttagccactgaggatgtttgcatttgattcatttgcttattatgatcaagaaacgttacctgtcaacattggataaaccatccgagggaaattaatcaaaacccccttcagacaaactgcatcacatcgattctctccttataggccttcttgttttgtgttctctgtgtgtgttttttttcccctagcgtgctgaagggtggcattggagtaccatttaaagaataatttttaagaaatgaacatcaggacatagacgtctgaatatgaggaagtgcctcatgtgaaaaaggacgtaatgtgctttaaagaaagaagaaggagataggacgacacttttgatacaaaggttatttttataatacttgcatttttatcggttcacgtattttaacagggagccctgactgaagtcacaaaaattatgactccggcaccgaggtacttatctgacaaatgcaatgcgaatggtcttgttcttatcaatgagatcagatttcagaaatgaatgcgaagaccgaggcgttgctttgtgcacagataaccttgcaggcgcaaactcccaaaccagaataaaagaattctctatgaaataatgggccaggaagcccaatcgcgtcacactgtaatagacagtggggggtggaatcaaaagggggaaaaaactcatttcatctcagttaatggcagggaaacgaaggcagagaaggactttctttggagcggagctggtacgacaaagagcagggtttcgccgtgtcatgcaccatttgccgttgcactagggctcttttcaggagctgtgaagccattattataatgtgaaaaaggtggaaagaaatactcccttctggacactggaagggcaaatgaggtgcaagccttttttttttctttcttttcttcttcttcttcttcttttttttttttttttttttgkttttcctcccagcctctctcctttcccattatgcacaatgcgctgagaaaggattcccagtccccctggtaaaaagtctgraggatgccgaggagttcactgtgcccttagataataacagtttgtcttggctctgatcacycctttttgtgacttagctggctgggaagtagcaaaagtatcttccaagctcagcttctctctgcttgcattctttccmaatacgtgattccaaagcccatgcccaatccttgcactgaagcttttagcaggaaaggtgaacagaggcatctggatgcatcgcggccagtctgccccttgcccaattccctcccctctcctgcgtacaggtcatccctgagaagtgtgcctgtggactgcgttctttggggtaggacatggaatgggaagatgaaaagaaagccttcctttttctgtcctcagccgtaagaaagaatggtttcttcacagtgccgattggtaaaaccaagttctttgtaaattatggaacccaagctggaacttggagagcattcttctaactgaagataaatatggttgccactgtctttataaaaaaaaaagaaaaagaaaaagaaagagagaaagagaaaaaactgcaaaaccgcaaactggcttgttcttatgtggttgatggggacagcaagattacatatatagccagcatttgattctcaggactggtaaagtgtgaagaacagcagtgacattctagtcttcaataaatcactataaaaatgtttatgaaccctgcaatttactgtcttttatatgcaaattgaaaggggcatcattgcaagtgtaaaggagacccgaggtggcctgaaggaagtgtaaaatgttgcagtaggttttggagattgtgtgatcttaaatgggatcatttccaaacgattttgcgtttatacctctgtgacagttcgattaatttattaatgagattgctgtaagttgcagggaagtagaggccagcttggagttaaagggtggctttgaatgaaatacattttcatttcactgaaagaagagggaaactggtgattccaaatccagatccaaaaagttattttggcaaaatgaaatcagaacgtggccccttccatgaaagtcagctcaggcgtagaatgttcttttttttaattttttttttaacgaaactcacatcttctttaaataaaatctccatttagaaatttttgaagacttgtggatagaagaagtaaccttgaaaagggcagagctgagccagacmmcttttcagctgggtgctccctggaagatggatcttgccttgtggatgtttttctaccgtgacagaagatagaaaggatgaaatagaaagagtgtgagtgaattctgcacccaccmccrccccccagcttccccacctgtaaaatgatttgctcaaagtttgcaaagaatggaggcatattcaaagtgctcagcactgggccggacccatgggtatgmattcataatgatcagcttcattctctccctttccctctctctccacacctttccattcctcctaactaatgtgggagagaagagaaaattacagtgagagatggtggtcagtttacaacagtatttagatgagaattaagattatgtccattcagggagactctagtgtgctctacatccccccaaaatgtggggacaatatggcaaatatggccaggtacagtgacagaaagtaaacagcccatgaaaacaggttgctctgcaattctcccaactgttcccttcccgcttcccacctgcctcgtatggaaaacacccaaagtaggcactgtttatagagccatcgcttgcagaacatctccccggcctccgacatatgtgccataaatgctgcagagctgcgtccacagtccctgctccggagaagagcattttgcttgttttcaaacacaagcatcctctcccgcgcctgggagggcgaggtgcggatcttttcgccttggcagtccctcgctcaaatgtgcgtctctggcaagtcctgtctgctgatagttgatagtgctgccacagagcggctgtcagattccaaaggcatcataccatctgcttttccaatcttctgctcttcaatgtagacatatgttcgagtggttcgtgtgtgtgcgtggtgaggggggtgctattttccgggggaagaggaggaggagaggatgcttaactccaagagtcctcaaagcaaactgaaataaaattttaagtgatgccaaaataagcagtcccagcaagacatgttataatataaggtcctttccttaaaaccatacctatatcagctttggaaataacgtacctcttaactgcatggaaaatctagaagattcgtggcttgggtctgtttctattcttaccacggtgacacgcaaaagaattttttaaaaaataggtttgttgttatttctgtatatctgtatgggcctgacctcccttttctctgggctttctactccagatttttattttatttttacactttcattgccctttgctctttctggctttcacctaaacaatagcatgtatatacaacagtacctataaaattgacgctcgtgtcactgatcatgccaagaaacctaatgtatggtgaatttgcactagtatttatttcctccctccctgtctctcccctctcctcccctcccttcctttccctcctacccctctttctttgtattattcccctagaaggaaatattcaagctggctttagagaggatagcaattgtaaggtcaaccaagtatgggatggggaccggaatagattttctctgcagatttcacgctgccttcccgggaatttctgaatgttttgcagcctaatgtttagcttccaacattctttcttttttttttagacagagtttcacccttattgcctaggctggagtacaatggcgcgatctcagctcacagcaatctctgcctcctgggttcaagcgattctcctgcctcagcctcccgagtagctgggawtacaggcatgcgccaccatacctagctaattttgtgtttttagtaaagacagggtttctccctgttgttcaggstggtcttgaactcctgacctcaggtgatcccgcccgcctcggcctcccaaagtgctgggattacaggcatgagccatcgcgcccggcctagcctccaacattctttaagaaaactgcaccatgagtaaaatggggacgtttttctcttctgctgggacccaggacatgttggactgcacatcagttcattctctctgatctaaggtgttggctgctcttctcccttctccactgggctctgagcttcttgagtgaagggtctgtgggttttcacgctttgtactcgggcccagagcagagcctactgccttcacagaagatgctccacatgtgtttgtagaaggaacttggaagacagtcagttttaaagattttttcactgagggactaagagaaatagaaacagaggggattggccacacctgaagtcattctgtgttcaaatcttggctctaccacctatgatctgggagctsttagaggagttaatcgatgtagttaagactcaatttcttagtatatacaataggtgtaatagtaaaaattagatgactttgatgtgtgtaggtaagcggctagcacagtgctcagcatgcatgaaggactctttcattatcgttattaactgatgtttttaacttatacattgaaakgtggaaacaagcsttgcttctattgaatgacttcttgaaagtgccagtctgatccttgaccttcaggtgcatctctaaattctttcatgtcagggtctctgaaatctgaacacatctcaaagttcccttatgcctggcaggggcggtgtccgactttgttattgcctatgcatgtataaatgtcccaaatgccagcaaccaaacttgcaggatgggtgttgacagattccaggaaagtcccagatgtaacagcggaatattccaccttctaggaaccaaatggctgtgaagtggagagacaggcagagctagaaatattccggacgtggaaatcaaaagtaggtttgcgcaacacaactgcagagccagctcaagaacccagcgccagtggctgatgcttcttctttttttttttttttaatggattcttctaaggatggctgcatcagccaggggcagcrggtcatacctgtaatcccagcactttgggaggccaatgcaggcggatcatctgaggtcgggagttcgagaccagcctgaccaacatggagaaaccccgtctctactaaaaatacaaaattagccaggcgtagtggcacatgcctgtaatcccagctactcgagaggctgaggcaggagaatcgcttcaacccagaaggcggaagttgcggtgagccgagattgcaccattgcactccagcctgggcagcaggagcgaaactccttctcaagaaagaaggaatagctgcatcacttatgctcttgatggtacagaaaatgatcygcatggaggaaatctagacatcagcgattcagagtcaaaatgttattcaggggagagagacccttcatgtgaagaaattttaggaatactttaattattttttcacttacattttatagtatttattgtatgcaccagagtgattggtgataaaaatggaggcctacttaagtctaagagagttcttgtgaaagtgggagggggatgagggttggaaaattgcctgttaggtgccatgttcactattcagatgatggatacactaaaagtgcagacttcaccactacgccatatatgcgtgtaagaaattggcacttgtacccttgaaatacataaaactttataaaaaattaaaaagagttactgtaatgattataaaatgaaaattctacgtcatgagaaagcattgtgccatattttcaccgggagcatttttttttccttaggggaaatgaaaaataatggcatctatgatcttagatttagtaaaacgcagtatcttcttccccagctgaaatagcgaaagggtctcttcaggctcctgggataaaaaccaggatscttcatgtgtctgagcaggcytcccaccatttgactgctgctcctttgtccagacacatttaacaccatctccctgcaccccttcactgggctccgaagctgcgttcacacggcacgtcattggcagctcatctcagaaggttccagctttgcctggcaaattctcctccttcctttagatcccatctctggtagacagagtaatgagycccgaagatgtccaggccctactcctaattccatggaacctataaatatgggaggttacatggcagwtggggaattaaggttgcagatggagttaaggttgctattcactcatcttcagattgaaagatcatcctggattatctgggtaggcccmgtcgaatcagagatggggaaaagagaggcagatgggtcataatcagagaggtggctgagtaaagaggacttggcctgatgttaccagctttaaagagggaggaagcgtccaggagccaaggaattcaggcagcgtctagaagccagaagaggcaaggaaagagattctstcccagaacttccagaaaggcacraagccctgctgacctttgattttagcacagtgatacccattgtggccttctgaccttcagaaaataaatttgttttaagccactaatttgggggtaatttgttacagcagccagaggaagctaaggcaccctataatataccctctaaaagcccctttcttgggaagttctccagccttccccattgactctcagaggaccctggacctctcttccatggcattgccatggtttgtcatgttgcacttatttgtgtgatgatttaattaatactcatctgccccactggacgtgggcaggaatagtgtgtggttcaactatgagattcctagggcctaccaccgcctggggtccaagaagagctcagcgagtatttgcagagtgagtgaatgcaggaaggagtcaataaatacattaattaattaatctgcaggagaaagaagggcaaggtactatgaactttaattaaacacatatcccacatccaggtgccagtcagggagctgcgatttaatttgctgctgaatgcacttttgaataaagggcctagaagatgcagtctcgaggaacsgaggccggttagagacaggctggcagctttgcctyctctcccaagacaaaggcctccccgcccccctaaatccagcacacaatcagctgctctccctccccctattctcagcaggagagtcaggatgcatatttctttaagggatgctgttgagtttcttctggtggagcgaaggatttgtagcaaaacccagcatgtaactcgagtgttctgtgaagccagatattggtgccaagctaaatttgtgcgtgcagcttctgtttaaggcaattatatagtgtgtaatacccagtagmgaaattaagtcgaagtacattttgcccatagagattatcctctcagttggatttattttaaacaagttttgccccttatacattaaggtgcatgcaataaatcacttatgtaataaactactctatattatgtgggaaaaaaaaaaggagctggtggcagggggagagayttcaaattgagcyagacctcaggcatgaagggaggggagagagggggaaatgtggaggaagggggcgtttgtgcagtgggaagttggagaaagtacaaatgaaagcctctctgcagtgaacctcatgactgctttagagaggtgcttatgtaataactgcagtggtgtcgctttagaaaaagttacagagcttgtctttctagagcaacctcttggcttatcttaattaccagcagtccatagtgagactggagggaagaaaaaaagatgtaagcttttattaaatagaagaaaatcaggggcagaggacagagggtgtgattaggggtctggggtaaccacaaatctgggcaactggaatttattgtaatggtaaattacactaataataatctggggatgaaaacagggcaggcagtgaaacctgaatctcagctggacgatgaatgagttttaatgtaagtgtatcgacgtgctgtactcctaacacattatttgttatctgaaatttagatttccttgggtgtcctgcctttttttttttttttttttttttttgagatggagtttcactcttcttgcccaggctggagtgcaatggcgtgatctcagctcactgcagcctccaccttccaagttcragtgattctcctgcctcagcctcctgagtagctgggataacaggtgcacaccaccatgcccggctagtttttgtatttttagtagagacagggttttgacatgttgccaggctgctctcgaactcctgacctcaggtgatycacctgccttggcctcccaaagtgctgggattacaggtgtgagccaccgcaccyggcccctgcctttttattttgctaaacctgatgacccttgccatagcagaactaaagtgatgatgatgattacagcagatcarttattttgagctctgastttgcatgaggccctttattaagtgcttcacttgtgtgatctgatttaatcttcacaagcaaactgggacagagggactgtgcctattcccatttcacagaggtgaaaactgacacttagttttcacccgggttctccctgtctataaggggaaaagacagggttcacaccaaggcctgtctggatccaaaacccatgctcataatcactaagttatactmcctcttcgagatgctgatttggaaaataactccatgatgaaacatgtcaagggagactgcctgtactccgtaatgcagaaatgcattagagctcaaaaatctatgctgtttaggaaagaaaaatgatatcgctcagaaaatcatttaaaaacttcctggtgaatgcacccagctcgccaatgcatgccagccacagggcctcayagcacatttcaggagcaagacaattcagaccccactcttccccctgaaaaacctccttccagaaccctcttttgcagtgagcagagataagcctctccaatttacatgtttgtcattctctaactttgagagcccaataaaactaagtgcttagtgagaatcagacatggataagctgcttgtaatttatgatttaatgcagcatagtataaaaataggcaatgaaactgaaaggcaatcaaagtctattgtcacaaggaatgggaggaacggggacgtgatctaacatttgctgagatcctgctgtataccgggaacagaacatatatggtttcatttcatcctcccattatcaccgtgaggcctcttccgcttatctattgctgagtaacaaggtgtacccctcaatttactggcgtaaaacgacaacagttttattacatctcatgattttctgggtcaggactctggatagggtttggctggttgagtctcctcttgcagtggctgttgatggaggtcatttagtggaatccagttggcaggagagctggccttggagggtctaggatggcttttgtcacatgtccagggctttgtcaggttagcagggcagggagggctcagctggtctcagctcgtggctgctccagcaccgtggtctcagggtgattggattcttgtagggcagctgtttcagctacacagcagaagtggcacggccttttctgacttagtctcagaaggcagagggtgtcacttccactgcatctttggggaaggcagtcaccactgtatagtcctgagctcactgggattaaggggaagggacacagactccacytctcgatgagaggagaagcgaattgatgggcagattttatcactgtcctggggcctttgctctttgcccttccctttgccaagaaagttccctgtactctgcaatgctgagtacttctcatccttcaggtctactgcaagtgtcacytggccaacacaccatgccttcccagtctctggtgttactstctgcatactgtagaccatcatcttgtttgcatacttgtctgttatctctttatcatccktctacccacatcaggcaattccaagagagaagaccactggttttgtttgatctagtccctgttgagtccctgtgcaccttcagaaccacatctagcaatagaaggcgctgcacggggaattctggaatgaataaaaacgcttggcagtaccgcatggcgagccaktacccgtgaatgctacttcctccaaagagaattcctgggataacagagaatccattcatggctgccaggaggacttggatatttctcattttccattggccctggagtggaggaacagagccgaaaagtacgtggggggcaggcaaagctgcggtcagaggcagaccctgttggtgttggccgtgtcaascagctttgctggtttctattatagccctggtgtggcaaaggacactgtgtgactgtgagctcaggtcagcattgcgatcccttcaggcctctggcttgcaggttcctgttcaaccctcttaaatatgcttttgaagcccgtacgttcggtccacgccaactcctgtttatactggtgcgaagtgatgcctgctcagattctgggcgtttcacgggaaggtattaaatgtgttttgaaaatacttgaaagtccagctgtgtatgctttattttatatttagccttaaattagagactccatatacctcaagtaataaaaaggcacagcaggcacttgggttttccctcagcttgctggggccgtgcacctatgtgagattttattatttgtaattttgggggggttaatttcacagcttaattctggcctttatgcatttagagctcccctcttgtgtttcagaaaggaggagttgttgttttcttttcacttgagtttaataaatgaaaaaggggaagggagagggaargaagaggaaaaagcacaaatgtgcttgtttttggatcagcccctgtactgggcacatggatgcagtcagtcctcagtgtaccccaggaaagaggaaactgagtctccatgtggctttctgtctggcctttctcttttgcttgccttgtgctttgaatgcaggcctgmtgtttgcctgtggacctcaggatttgtaaggccatctccacccacctacagctaagtttcccaagagccgatctccagccgaagtccaaggttccttgatgacccctgggaggagatgcaacacacagtttcctagaatcatttactccccaggctaagcacagtcacagaaatgaggtagctgtagccaaggatgatggcatagcacattcgtttcttaggcgtgccacgtactaggtggcttcastcagcagaactgtaytttcccacagttttggaggctcaaatttgcaagtcgaggtttcggcaaggccatcctctctctgaaaactctatgggggcgtcctctttgcctcttcccggcctgtaggtatttcctggcaacctttggtgtttggggcatgttgtcacctcattgccatctctgcctctgtcttctcaccaccatcttccttgtccatgtctctctrtgtcttcartgttcttcttatarggacaccagtccttggatttagagyccaccctaattcactgtaatcacatcttacctaagtccatctgcaaagaccctatttccaaataaggtcacattctgaggccctgggtggacatgcattttagggaccctttcaggccaccatatatggattccagagtgaccagtagaacatagctcaggccaagagagaaactcaaccttggtgaagttgcatgagaacagaaggcagccctggtccctgggagaaacccatccatactctggttacccactggccattcctggggacaggcggcaggtgtttagtcccctctctgcaaccatttgcggtcacctcttatgtgctaggcctggtgctcagcgctgagtgaacccatatcaacaaggcatggtcactgcgctagggaagtccctggtccagtggggtgagggtggcagtggctggcaacaaagacaatgagcgctgagattgaactacagaaagcagaagatggggtgacaagtttggcctgcggcaggaaagacttcccagtctttaaggataagtggcatttgatgagttgcacaaagaggagacctgtcctgggaatggaggagaagatgtgaagcgcgggaagtccagggacacacagccgtgcagagacccgggggcctcagcaggttagagtgtctgcatggcaccggcagaggatgaagacagggctggggaggggcatggggttagcctaacaagggcatcaggtgccaggttagagtttcggtttctaagctgtagataacaaaaatttcttgaatgcttttagcccctgatctgagttacgctttttttttttccttccattttccatccaacagacatttgtgaggcactgtatttgttttcaattgctgctgtaaccaatgattacaaatgtaccgtcttaaaaacctaaatgtattatctgacagtcccataaggcaggagtccaacacaggtctcactcggctaagatccaggtgtaggtggggctgggctttttctggaggccctagagggcagcttgtacccttgcgtcttccgtttcttagaggttgcccatcttcatggactcagggtccctttcctccatcttcaaagccaacagcacctggctgagtctttctcatgctggcatccttctggctctctcttcagattccctcttccactttaaggacctttgtgatagttttgcacccactggatgacccagaatcatcttcctcttttaagatcagctgattagcaacgtcagttccacccacaatcytcatttccctttgtygcgtaacctaacatattcacaggttctggtgagtgggatgggggtatctctaggggaccattatccagccttccacaggcactttgtcacaggccaggcgctatgccaagcagagaggtcacaatagcaaatgacacagacaagatccttgcacttccaaaacttatgttccagtgagggtgaagggcgttgaagaagtcaacgagaaagtcaagtttttacagtaagtgtaagttgtgtgggtgaaataaaaaaggttctttgctggagaataacaaagggagggacttacataaatagagtaatcaggggagggcccctgagaaactctaaaacatgaggaaagggctcatgatgtgaagaactggaaaggtgttccaggcaaaaggaatggcaaacacagtggccctgagacactcagagaaatcactcaggctgccttcgaaaggatgtattggagaagatgaggccaggggattgttagtaactgttgcaaggatccgggagaaagatgatgaaggccttgtagggcaagctggataagagcacccaaaatatccataaccgaatccccactacataggcatgctactttatatggcaaaagggaatttgcagaagctaagcactttaaaattattatctccttaaacctcactgcagagttataaggaaagcactgttatcagatgaagaagtagatttcatcaagtgactcacccggtatcatatagctgcttagcggcaaaaccaggatgtgaatggagagctctttctcggataccaaagctatttaatatttatcattgactaataatggtagagaaagtaatcatcataacctctgccctttattagtcactcatggtgtcacaagccctttacaaagcactttgcatgcaaatgattcctcataacaaccttgggaggtagttactttcattgtattagctatctcttgctgtgtaagaaattaccacaaatttagtatatttgttatctcatagctccataggttaaaagtcctggttcaggctgggacttctgctcagggtctcwtgaggctgaaatcaaagcgtcagccagggatggggtcttatcagaggcccttggttaytaacagaattcattttcttgtaactgtaggactgaggtgcttgttttcttgctggctgttgactgagggccccttgcagcccctagaggctattctcaggctctcaggccctatccacagatgacctcacaacatgactgttggcttcttcaagactgaaggaggctcccccatgctctgagtcactctcttcagygagggcccagccccttttaagggcctagcgattagatcagtcccacttaggattgaatcccttttgattaatgcaaaaccaactgcgttcaggcctccatgacatctgcgaaattcctccccctttgcttggtagcctaactcactcaggggggcaaattatcccatcatattcacagttgccgcccacactcaagagaggggattctataggaaatggaagtcttgggggccatcttgaatcctgactaccatagtctgtgaaatcccyatttcacagatgttgaaactgagacttagaagcattatgcaccatgccaaaggccatggaaggacagagcttgggcatgcycccgacaccaggtcatactgatgtcactctccctactcccttcactccctccagcacctggccttcacctgaaggtgctgaccttgctgtttgttggtttcagcaaacaaagggagatcacagcacctgtcccaggccttgtcttccagccccacaaacgtgcacctgcagccggagaccagggggccccgatcaggtggcagggcctttaattggagccacgtktgtataatgagcagcgcacacacacaaaggcgagctaaaaatgtctccacccttctaaatatgggatgccttggccaggtattgagtcagctctgtgacgccagtgcarttatcccgattcagcatcagatttattcaccattaaacatgttctaacttgattgcaaacaagccttgtattatttagagggatccacggagctggcagagggggcagaggtgtccgcaggcctcctgcccttccaggcttaatggatgatcatcttccctgctaaaaaggcccattcactaggtgagtgatgtggaactgtttaatgaaagcaggaagatgatgtgaatgccagttcacttgagtgttacaaacggtttgggcactatagccttaaagtttctcctgctctttgcagatgaatgaaggggcgctttctggaatctttgtggctggggctgctgctctgcactgctgtggctcttttycacaaatgcttatggagctctaactgggggcaaggaactgtgctacggttgggaagagaggagtgggcaaaaggagacactggggcttctgtgactttagaggcccatcatcaaattttcttttttttttttagatggactttcgctgtgtcacctaggctggagtgtagtggtgcgatctcggctcacagtaacctctgcctcctgggttcaagcgattctcctgcctcagcccataggcacatgccaccacacctgactaatgtttgtatttttggtaaagacaaggtttccccatgttggccagccttgtcttgaactcctgacctcaggtgatccacccacctcagcttcccaaagtgctgggattacaggtgtgagccaccgctcctggcacccatcaaattttcaaaggaagaaatggaatggtgcaaccatggtacatgggaaggaggagggggacacacaagactgtrcctatcatgggggcttcgacctcatstgggaaggtggttggagagagtgagtcctgacctgagctttggaacttatcaagttgagagagaaatttgataatttgtctattaacgtgtgaccttgggcaagtcattgaccttctctgaacctcagtatcctaggacttcagaagcgaaaggaagaataatgggtcttgagtatgcctagaattgagcaagctgctatscttgcaaaggccttggccagctgctcacccaccatgtccctctgttcccactccaccttactcatgcctagacttcttgctttttaaaaataatccacccatgaaacaagtgtttatttacaaggctggcttccccaggaggctttcacaaatgcttaccgagcatctgctgtgtgccagacaagagtgaggagctggggactcagagaggagcagacgagggagacactcacattagagagtggcgtgtgctgagggaaggtgcctcaggcgacagatgggaccagggcctttaactcagtggcagcttcagagacagatctggaaccccaggactcaaaggacctatgtttgctaatcaagtgaacacggaggacctgccactgggcagggcatccctgaccaatccacaggtgatggcgggacagctccaggccctggggatcccccagggaataagccagattaaagcccctgccctgtgaggtgtggcaaagaaacagacaattcatgaaataaatatatgataaataacatatgagaaggcagggagtggtatgaaacaaatcagggaaggaggagacggagaagttggagaagacagtggattgtttctctgggtggtcaaggaaggcttccaggcagaggaggtttggccatgggtaccaaggggtagagatgggaaccttccaggkacatggacccgatgctgccagcagaggggaaaccatggccctaagggcagagcacactggggcgggggtgggggttcagtgacagtctggtggcctgtgtggtgaggagtgcgggagatgggaacagagagcgagagggcagacggggtcatgttgtgtgggacctcggaggtcctgccatggctttggtttctacttggagagaaatagggaggtttgggcaggctctgagtagaggagtagcacgatctggcttacgatgatttctaacatctcaccatctttacttctgtatataaatatatgataagtatacctttatatatgtgacatgtatctttayatatgatatgtatggttacatatctactcactcacacatccacacacacacacacacacacacacacacacacacaccttttttggaaccattgaaaagttgcagacatcatcacggctcaccctgaaattccttagcaggcatcttctgagaataaggacattcttctatgcaaccatttcacatccacactaagaaaattaacactattacgtagtattatctaatatgccctctacattcaaattttcatgtctccaatcctgccccctttggaacttctgttggtgttcgatctggaatctgagaattcccttgcatttggttttcatcccccatagtcttcctttttttattttttattttatttatttatttatttatttatttatttatttatttatttatttattttttgagacagggtcttaatctgtcccccaggctggagtgcagtgacatggtgatggctcaccacagcctcagcctccctgggctcagtcgatcctcccacttcagcctcccaagtaactgggactactgtsatgtgccaccatagccagctattttttttgcattttttagagatgagtttttgccgtgttgccgaggctggtctcaaactcctgggstcaagctattcacctgctttggcctcccaaagtgctgggattacaggcatgagccaccatgcccggcccccttttttaaaaaacaaaaaaacaaaaaactcttttgtgttttagaaatggggtctcactmtgttcttcaggctagtcttgaactcatggcctccagtgatcctcccgcctcagcctcctgagtcactggaatttcaggcatgagccactgtgcctggcctctgtcaacttccttatctagaactatctttttcctctattgttttgtccctcacttctgaatagttcagggatccctctggctactgtgttgagaataaagtgtcaaagccaacagtggaagcgtggacactgggtaggaggcttttgcagtgctctcggcccgcgctgtccaatagaactttctgcagtgatggatgtcttctatctctgccctgtccagtataaaagccacaagccacatctggctgtgtggcacttggcatgcaactagtatgacatcttaatttttytttttgagatggagcctcgctctgtcacctaggctagagtgcagtggtgcaatctcgactcactgcaacctacacttcctggattcaagtaattctcctacctcagcctcccgagtagctgagattacaggtgtctgccaccacgcccagctaatttttgcatttttagtagagatggggtttcaccacattggccaggctggtctcgaactcctgacctcaaaagtgatttgcccaccttagcctcctaaagtactgggattacagacaagagccactgcgcagacggacatatgaatttttaatttgatatcattgtgatcartttgaagakccacatatggctgagggctactctawtgagtggtgcagctccaaggcagagagatggctgtgattaaccaatgaatgagggaacaaatatccaggcagaatgaatagtctatggaaagggctggaagttccacaaagcaggacgtatacgtgcccttttttcctcccctggtggccagccagcccctgaaacacagcaggtattcggtgcagccttctgttttcttccagatcctttgactcctgccccaccaacatggcccgtggcagactgggctgctgtttgtaagcctggctgaagaaaggcatcacaaagaaaatgccaccagcaggctgggtgtggtggctcatgcctgtattcccagccctttgggaggccgaggcgggtggatcgcctgaggtcaggaagaacctgggagattggaggttgcagtgagctgagatcgtgccactgcatgtcagcctgagcaacagagcaagactccgtttcacaaaaaaaggaaatgctaccagtgagcaggaagttggtggtcctccagaattgccctgttgagggtatctccctgccctggtctgaaagctgccacttgccgcccaccgcacagccccagggctttagctcactgtgcaggaagaggccttcctctgtgcatcstcccacagggtcgagagtgaatgccttgcctttaaaaataaaatgcatacgcctgtcctcatgcgctctgatctgccagcaggctgtgctggggagtggtgagtagtacagggatgtgtctgaccccaggagaactgccccgatccctatcttgtctctgctcagttctgrtaactcttttatcttccctggagttatttttttcccttctttstttctctttttctgtgtgctcttctaagagtaaaacgcatgtccccccatgaagtcactcaaagctcaggcgtgtgcaacagggacagcaaaagcacacacaatgatggccagagacactgctyagtgtactgtcttccaccgggacagcccactcaccaagggttaggtcctgtgctgmctgggtcccgkgtctcctcggaggtcggtttgcatcacgtggatacactaatctacccaagttgacttggagaaccaatctgaaatcagatgggagctccmggaagcaaagcaattgcaggttcatttgttacttttattgtctcatttcttcttatttttttagcccaattgcctcctacatggggaaggttggggtcctctttattctacttttcattctcgctctgccgccctcccaggtgtttgtaatcacatatttttcatttggtttccgggtccagcgacaagaacaccagaaacacctcctccccagagaggaagagaggatgctccgccgcctgtaaggattttttgctctcctccttttgtcagttggcatgcgatatgcttctcaggcagtaatttagagactgtcaattcctgagagccgctggggaactgagcaatcgyctgcatttcgtcgctttarcccgagctgggtctttgagctggcagagaccaagatctttttctgggaagggatggtcctatttaaggaaggccctggattttgtcaagtttgaaaggttttcaacatcttcccgagatggtggtcatgggagtagtggttagggtggttatgacgcatgggacgggagaataccatgcccacccggtgatttataccaaaagatgctttcctggggtggttctgctggcagtcgggcagtgacatgttattaatgttttcctgttttctattgtccccgaatggaaaaacactgtggaacctttaaattttctcaagctgtctatgttttcctggatcgtccctcaattttccgtggtatgaaaaatgtaaatgttgctacattcagttcagggaaatccagccgttgctccagatccttctaagatttttcaattccagagatgttttcacctggaagattccccagatttggcaaaaacaacccaactcctagccactgctttttgagcagctactcagtgcctwagactttgaatagtttattaatcatgtgtcactgcagcaaaggggacatttcggycctgatttcagagatgaaagaaccaaggcatagaaattgagtcactttctggagtgtacacaactagtaagtggattcgagttagttttgctctattccaaggctacttactatgctatttttggtttcctacttttgttcaacttatatttatctgattatctgattctcttttacaagcacttagtgagcatcagctgtttcaatgagcatttatttactgatacctgtggtggcacccaggaaggactaggaatgctctgtgatatgtaggagaaggatgtatccactgggcaaaggtacctgcgagggatcaaagatggaaaggcagaaatccaaggactacgtgtgacatgaaaggggcctttctcctgctgtcatcctgaacctctgtctttcaaatttggatgtgtcgggggccacaggacactactgtgcatttgcctgtgatttgccattgggttggagtacttctcctgagtttctgcagtgttctaggtatggtcttaggccctggarwaagacagtgtaggaaacacagaaggtgcctgatttcctgggcctagctaaggggaaaaagcgagacaatggggtcagakgaagctcagctgaacagatgaagttgagatgaacagaattccagtgccaccatgatttccagccgtgtgaccttccacatgctttttgatttttcttgaactmacttttcctttgtttgcaaaatagtaacaatattttccttccaagtgatggtgaggatttmagagttaacctgagtgtctgctgcatagtaggtgctcaataaactataacstctttatttcttttccttccaatgagaagtcacttcctggagggaagccacctccaggaacagtcctggttcaactcatgaggagggtcactggttgggttccatattcatatctgcaaccagagttggaagcacaccactgtgggattagtcatgtccctagtccctgtctccgtatattttctccttctcttattagtttatcttttccaaaatgggctgtttcgtctctgatcctgatttatttttrttttaattaaataatttatttttctgagacagactgtcgctctgtcgccaaggtggagtgcagcggtgtgatcttggctcactgcaacccccgcctcccgggttcatgtgattgtcctgcctcagactcccgagtagctggtactaaggcatgtgccaccactcacagctaattttagtatttttagtagagacaggatttcgccatgttggccaggatgatcttgatttcttgacctcgtgatctgcccgcctcagcctcccagagcgctgggattacagacgtaagtcaccacgcctggcctgatcctgacttagttacggttacctctctttgtatctctatatgttctcaaattccaacctgtctttgtaatcctctatttaagctatcgattacctccaaaaggccctgaatgtttcagaaagaaaggatctactggcagcttctgaaggcttctgtaataccttgtaccccaatgagtacaatgaaatcattaggggttctttcctctcctttggaatgaaactgctgcttaacttttctcccactgatgagatgcggtgatgctgtcacagttgggtggttgctcctcctgcagtcttcttcccattgcatgttcactctcttccccacttgcccacgagcagcaactcctgtttcttgtttttttccttttctttttcttttcttttgagacagagtctcgctccgtcgcctgggctrgagtgcagtggtgcaatctcagctcactgcaacctctgcctcctgggttcaagcgattctcatgcctcagactcctgagtagctggtattataggcgcacgccaccatgcccacctaatttttgtgtttttagtagagatggggttttgccatgttgctcaggctggtctcaaactcctgacatcaggtgatccacctgcatcggcttcccaaagtgctgggattacatgcatgagccatcgcgcctggctaggaactcctgtttctgtttttatcctcttcccaagtctgcaggccccgcctggcccacccagtccttcttagaagatgatgacctcaactactgctttttaaagaagactgacgtcgtgttaactgagtttcgataacgcccctctgtgtattttctcatcgtcttattatgttttccaaaataggacctggggtcgaactcctgacctcaggtgatccgaccacctcgacctcgagaagtgctggcattatggatgtgagccactgcccctgccctagatggtatcaccttcaaagcttaattaggaagaataatatgagcactgagtgtaactccaggtcgggtatattatgtccctctgtgttctctagctagttatctatccatccatctcttgccttgtccacagaagttacaggtaggctgccgggcgcagtggctcacgcctgtaatcacagcactttgggaggccaaggcgggcggatcacgaggtcagaagttggagaccatcctggctaacacagtgaaaccccatatctcctaaaaatacaaaaaattagccaggcatggtggtgggcacctgtagtcccagctactcgggaggctgaagcaggagaatagcgtgaacccgggaggcggagcttgcagtgaaccgtgatcgcttcactgcactccagcctgggcaacagagcgagaatccatctcaaaaaaaaaaaaaaaaaaaaaaaaaaaaaaaargaaagaaagaaattacaggtaggctagagcacggatgagcaaactgtttttataaaggaccagagagtatatatttcaggctttgcaggccctatgacgtctgtcacaattcacttctgcctttctactgcaaaaacagccatggacaattcataaattaatgtgcatggccgtgttctgataaaagtttatttatagacactgaaatttgaattccatatgtcatgaaattatatttttttgattttttttttcataaaaccagtctaaaaaagccatgggttattttgtcatggcacgttttgatatgaatatttccacccccattatttgcataacaaaktacagattatccagaacaggtgggctgtacataaacaggctggtgggctggatttgtcctgtggactgtastttgctgacatccaggctagatccttaatatacaatgaagtagtaaaacacatgtaaaagtaaaaagcaggcgwaatagaataaaatasacatttgcacaccacagtatccaaaaaggttatgtactggggctaaagatttggcttggagtttcctggtagtcaaggcaaaaaagggaaacaaaactagttacagagtttctcggacctatgagcaaaaggatktccatttctaatcggaggcagaggtatcatggccttcaagaatcttccggttaaacacggtactgaaatttgattttattgtctatcgttgagtccctagttattttgcctttaccaaggctagttgcagagtatttgttctagtatgtaaaatcagcaatcagccattttctggtcattgtaatggtgtaaattatatctgacagttgttaattaaatacctactcatgctttggagccaaagccaaatagtgctctgtaaacattatgatttgtcagtaatcaatgtgatttgtataatttgtgagcaatcagatactttatccaaaagcrgattattgacctctgtgcccatcttgggagaaattgccacttggtctgtgtctacacagacccaagaggagaagggatttgacaatggtctgattaattgaatcagtggtttgggggagtgggctgtctgtattgatccaattaaatagataattgtcagaatcgaggtcatgtctataagacaccaccatttcaaagccaaagagattgtttcaaacatatcatgctcaccccaatcaatgtgggccgcctcctccacatgaaatcaaccagaaagtgattgattctgcagagccataaaccagggtctttcctattttcggcaagtggttctgtgctaaatacagtgctttgaaatttttgttccccatagacccaaggatgatgattcattatgcaaataatggggatagaaatatacaaattgaatgttagggctgggcgtggtggctcacccatgtaatcccaacactttgggaggataaggtgggcggatcgcttgagctcaggagttggagacaagcctgggcaacatggcaaaaccccatctctacaaaaaattttaaaaatttagccgggcaggcatggtggctcatgcctgtagtttcagctattccggaagctgaggtaaggaggatcgcttgaacctaggaggcagaggttgctgtgaggcaagatcacaccactgccttctagcctgggcagcagagtgcgaccttgtctcaaaaaaaaaaaaaaaaaaaaaaaaaaaagaaaaagaaaaaaaaagttggaatgacatcagactcaaaatgtgtcacttcgcagtggggatgcaattctgagaaatgcatggttaggtggtttcatcattgtggaacatcatggagtgcacgtacacaaacctagatggtgccgtctactacacacacacttaggctgtatggtctagcctcttggtcttagcctacaaagctatgcaacgtgtgattgggctgcgtactgtaggcagttgtaacagtggtatgtgtatatctcaacatatctaaacatagaaatagtacagtaaaaatatgatattataatctttgggacmgccatcatatatgyagtctgtcattgactgaaagttgtcatgtagcccatgactgtcgtctcttttaggggaaaaaacaaaagcagaaagcaagcaagctggtatcctgcgtatctgtgagctcaggaagcagctgcatgtgcatactggataagcaagggagactccaaccccgggctctctaagggtgtaattgttgcaggcacactgaggggcagacctctgggtcttggttagtggtccagagagggaagagagcaaaggtagaaggcttgagtttaatttctgcatcagactcaaaacccagctaatcttttctagctggtcatttcaacctagctggtgatttcaggctagttaagcaacccctcggatcctcaatgttcttttccctctaatgggggtaaatatacttaattcactgggtgactgcatccataccaagcacacagccgtgatcagttagcctctcacttctctactaatccccactgtggggaagagctcatcaytaacatgccttatctgacatgtggcaataacttctgcctttcttatgtcatctgcatggttgcagtggatagtcactggacaattgatgaacamctactacatgctaratctctccctggggagagtgcttgtctttgaaacagtcaaaggaggaaggaagaaaagagaggcagaacaattataataaagcaacttaacccattgagagacataaggatgctgcaaggcgcagtgctggatggagaggacagtgcctggggcagtcatggaagacttcttagggaggtgactttttaaggggttttgtgatcaaaactatggagtcttaagtccaaccagtggttatgaattccggctctgccacttgctataatagctgtatcaccatgagcgataacttaacctctttgtgsctcagtttcttcatatataaaatggggatcatgatagtctctgtcccaggggagttaggaggattaaatgcaacagtaatccaaccacagtatgaaaagacaggctagcacatacaacacaatctataaatgtttgctattattgtcatcctttttattagtatatcatggtacaagtttgctgggtagaaagatggcgatggggaaggggacatttcaggccaatgtgataataaaatcaacagacaaaagaagggagagtgtggtgagtaggataaagctctgtacagatgcaaggggaagggtgttgatgtcaacacgcatgcagcttcccacacgtcgtgtggattcttttctgtgctctccattacggaatctccctgaaaataagtggtcactttgaggtttgatggtttaattctaccacaaaagtataaaaagcaggcagcctgctgtttatagatttttttttaagtgagggagtatgttaatgagcttagattgtcagggagctaaggggattcttgacatcaaattgtgggtagctaaataggtcaccccaagttattcagcatgggtggaagaccaagaggatacacaagcttcaaaaagttttcagggagagcaagagatgttcatttacctcattcaaaatggaatctttaatgctagtccagtgcttggccagtacaaggccattatatatttgttgaatgaatgaattcgtgaatatgtttataaagacaaggaaacgccattctgcaaatctacrtgcagtaaaatagtttttcagtcactttgccttcatttgtttgacattcttggaatatttgggctctacaaggtgctagggtaaggcacgcaggatgcaagrttagcgagatattgtctctactctcaagaaactcgctttctttgggaatcatcacctgtttttgtgtcayggaccccttgggcatttggtgccctttgcasaataatggttttgaatacataaaacgcacgggatcacagaggaaaccaatcatattaaaatacagttgtcaaaatattaactcatgggatctagtaacaaatgttcttccttcttaacccattaaagaacacagctcatggtcggtccattaactactaattatcaaaacagtgggtgaaaacgatgtttggaaatagctgcgactctcgcgtgatasgaaaatatctgtgatttcgattgcgacaaacacacagatgcttctcacacgatcgcagtgcattgcctaaatgacagtaatgctaaactccagtcagatgttagtgaaaaataaagatgtaacattttggccatctgtgtacaccccctctttctagggttccagccacagaccctcagattaaggagtctgcactagcttgtagcttgttcaatcacacatacacacaaaaagtgccagttataaaggagcaggaggttttctggagccaggatgagctgggaccaacaccagcaactgtatcacccagttcactgagagttaaaatcacccatgtgacgttctctctgcaggcacatagtaagtgctggataaatgatagggattgatattgaccagctttgacacatgaataggagagggttaggcaaagacaaagagagatggggatgccaagtaccctctgggcagaggaaaccatgagtgcagaggcacgtaggcctgaaacaggccagaaagcaccaagcaatttgcttttgctggtgaaggaggtataaaaggtagagttgcaaagactggggatggagctttaggctgggatcagcgcccaatgggctgggatgacaagtgcttggggcacattggcagctgcgaaaagctcgctctgatgcctgtgtggggacagattttgggggcaagaggactctccagcaatctgtggcaaaaaaaaaaaaaaaaaaaaaagtcccgcttgttatcaagcctactggcttatctgttatttcttggacatgccccagtcgctagtaaataaagctgtctactttacattttgtctctgtgcccttttacagccttttctcggaggagctgagtcccattatattccgaaagcatatgttcccgatgattgctcattctctttccaataatatctttgcaggacaaagaggaatggggaagggaacatacttttaggatgtcagtcccagttttaattacaagtgttcctggttgtggcattcatgtaattgggggctgatttatgccaaatgatatgcactgatgtaaggggctggagcccaagagggaggggaggccaagaagaggcagtggccccccaccaagcccggaactgaggtggcacatgtcagcggctttgctcagaagcacccagggatgatggaaaaggcaaccgaaagggctcagcttctgcagatagagtctgtgctttgcrctttctggctttgtgacctttctgcaggttacttctctcccctgagcatcagtttactcagctgaaaaatgcatctgctaataatacctatggcatagggtttggggaggattaaataagataatgtaaatagagtttagcrtggtactgtgtatatagccagcactcactgctgttggcttattgaaaaaamaaaaataatacctacaataaccacaatatagcaacagcaatcatgttcaagtctgtatttggtttaaggagggggaatgtgacccgggggctctgtcattagatatatgcacacacttgacctaatggaaagcttgaaagcaattggatgggaaaacagtccatcttgttggaaggctgtcaagctgtgtaatamaagaattactgttctccctttgcatttatgcattgcatgtctctgttgaattcagagtgctttatagacctctgatcagcttccagcatcctcttggtatgagttctagggggagatgaggaatgtgcctaattcccttgagtgatttacttggtgttaccctggagttgtgaggacaaaaggatggggctgactgagactggggatgttcatcacaaagtgttcaggttacatccaggctgattactggccaggagactaggcattcatagtggggcgtcctttaaggtctgaagaggacagtgaccatccaccacaggcaaacatgtgtgtgttaaaaaggaatgrcgttttggtctgtgctacaactgggatgaacctcaaacattacgctggacgtggtggcttacacctgtaatcccagcactttgggaggctgaggcaggtagatcacctgaggtctcagaagttcgagaccagcctggctggtggtgataccccatctctactaaaatatggtgataccccatctctactaaaaatacaaaaaaaaaaaaaaattagccagacatggtggtgcaggcctgtaatcccagctactcgggaggctgaggcaggagaatcacttaaagtcaggaggcagaggttgcagtgagacaagattgtgccactgcactccagcctggatgacagcaagactccatctcaaaaaacaaacaaacaaaaaaaacattatattaagtgaaagaaaccagatgcaaaagatgacctaacatgtgaatctgtgtatacaaagtacctagaataggcacctccaaagagacagaaagcaagctagtgattgcagggggctgggaaagaggggactagagaatgactgctaaagcattcaaggtttcttttggggttggttaaatggtctagaattagatcgtgttgatggttgtacaaccttgtaaatatactaaaaaccactgaactgtacactttaagtgggtgaattttattttatgtcttatttatttattcttttagggacagggccttacgctgctgcgtaggttgtggtgcagtggcacagtcacagctcactgcagcctcaaactcctaaggtgaasagaccctcccaccttagcctcctcagtagctgagactacaggtgcgtgctaccgtgcccagctgatttttaaatttttttttctttgttttgagacggagttttgctctgttgcccaggctggagtgcagtggtgctatctcagctcactgcaagctccgcctcccaggttcacgccattctcctgcctcagcctcccgagtagctgggactacaggcacccaccaccatgcctggctaattttttgtatttttttagtagagacggggtttcaccatgttagccaggatggtcttcatctcctgacctcgcgatctgcccacctcggcctcccaaagtgctgggattacaggcatgagccaccaygcctggccctgatttttaaatttttcatggagacagggtctcaccttgttttccaagctgatctcaaaatcctggcctcaagcaatcctctcctctgcctcagaaagtgctgggattacaggcgtgagccaccacacctggccgctggaaatacatttctaaagaggaatgggagtcaggctggtgaagaaacacgtgagtgtgggatgaggatggggacacagagtgatgtgaggcctacacaacaggagttcaatcctaggacctgagctgatgtaaatgaagcaccgccaggcccagttggggaggaccttgtgttcctgctggagagtgagagtccctccctccccattccactcccaagagcagtgaagagycaggaaggtgggcttgttttgttttgttwtgttttgttttgcttgttgagcaagggaatgcggttcccctgtgtcggacttgtttcagaaagacaatgtcactgaggctggggcagggagattagstgagaggctcttgcagttatctgggaaggagctgtccataaaggcctgagttaagacagtagccctttgggttcgatttagtggtggctccccaaaagatatgttcactggaacctagacatttgagaaaaagggtctttgcagataagttcagttgaggatctcaaaacgaggtcatcttgggtggaccctaaatccaatgacaggtgttttcagcagagacagaagtgaagaaggcacagaagagaaggcggtgtgaaggtagagactgagatcggagtgattcccccacaagccagggagcactgagggctgctggcacccccagataccaggagaggggcacaaataggttctcctcagagcccccagaaggaactaagccttctcacacctagactttagacttctggcctccagaatactaagaaaataaatttctattgttttaagctaccacacagatgcaggaaactaatataccctttaatgattttctccatggcctttctgataatcctttcatccttcatctcccctgtygccsttttctttgctttgcttgcttgcttgttttttttttttttttgagacggagttttgctcttgtcgcctaggctggagtgcaacggcacaatcttggttcactgcagcctccgcctcctgggttcaagtgattctcctgcctcaccctcccgagtagctgggataataggtgcctatcaccacgccgagctaatgtttttggatttttagtagagatgggttttmgccatgttgtgcaggctggtctcaaattcctggtcccaggcgatctgcctgtcttggcctcccaaaatgctgggattacaggcatgagtccccatgcccagcccctgttgcccttttcaaaacactaagtgcatcatgttaaccttccactcgcttctttaagtttcctcactccttttaggtgaacaacccaaaccctcatatgccctagaggcccttttcagccctgttgacacttcccttctctgtgctttagtcaccctaccctcggtcaactcctaactcctgcctgccacagggcctttgcacatcctctgccggggaggctctcccttcaccttcattaggttatcagatctcagctcacacatcacatcttctgagataccttccagactcccctggccacggtcacttcctttgctgtggactctctgggaactgtgtccccttccttctcacatcagcttgcagttctgtacttgttcatgtgatcattgatcagggtccattttctgctccagacaatgatctctatctagaaagaatcatgcctgcttttctgcactctcctgcctctaggggagagaacacagagcctggcatgtggtagactctttttttttttttttttttttgagatggagtctccctctgtcgcctaggctgcagtgcagtggcgcgatctcagctcactgcaacctccgcctcccgggttcacaccattttcctgcctcagcstcccaagtagctgggagtacaggcgactgccaccacgcccggctaatttttttttttttttttttggtatttttaatagagacggggtttcaccatgttagccaggatggtctcaatctcctgaccttgtgatctgcccacctcagcctcccaaagtgctgggattacaggtgtgagccaccacgcctgggcggcacgtggtagactcttaatgaatttttgctgaatactgagtaaataaagaaaagttaacacagtggagtccaggtacagtggctcatgcctgtaatcccagcactttgggaggtcaaggcaggagratcacgtgagcccagcagttcaagaccagccttggcaacatggtgagaccccatctctacaaaaaataaaataattagctgggcatggtggtacatgcctgtagtcccagctactcaggaggctgaagtgggataatcagctgagctggggaggttgaggctgcagtgggctgtgatcatgccactgcacttcagcctgggtgacagagaaagactccatctcaaaaaaaaaaaaaaaggtagagatggtggagtggtgacatttggtagataatatagctctgcagaamttttcattgcaaaatgaaaattcttcattgttattataattacttcaaggagcaaggccattttgtgtaagctatcctgggcctccctgcctcccattttacaccctgtttattgatastaagaagagcctccaactgaataagaactaatgacttctgcctgccatcattttggaatgtccaattccccrttctggagagcctttgattataacatcagcctgtcatttggacctctgacctgaattatatgaatctgaaaaatctcttcctttcctatcgtgarttcggtcattgttataagccaagctttgcaaaggtggaacaccttggagatacttatctcctccttactctmcccaagtaatgactcatccttttatacagaatgtctcttttttgatttagatgtctttttttgatatagatgtctcttgatatagaagcatttctcgggatggtttttgtggttgcctagtgtcttctaaagacccctgaacatagcatagaaacagcacgtgtcttaggcttggaatgagataatgtctcagtgtttgagtagaattagggagtttgctttattttcctttgtttttcttttttgttgttgtttgtttgtttttgagacggagtgtcgctctgtcgcctaggctggagtgcagtggtgcaatctcagctcactgccagctctgcctcctgggttcacgccattctcctgctctgcctcccgagtagctgagactacaggcacctgccacgacgcctggctaatttttgtattttcagcagagacggggtttcaccgtgttasccaggatggtctcgatctcctgacctcatgatccacctgccttggcctcccaaagtgctgggattacaggcgtgagccaccrcgcccgrctgctttattttcctttgtgttcctaatacctggcccagtgtctggcaaatggaaagttcccctggatgtagttgggtgacactatgagtgtatcgttaggcatgttcaaaatatagctaaattcagtccagacattctacctatgttttcacagaaacatgaggcagtgtacagcgcttatctgtggcatttgattaggacattttactgaagagttgataaaaaagcacaaattgtaggctgcaaatctatcatttttctttcctccttcttcctctccctccctcccatcctttcttgctttcttccctcctctctccttccttccctccctttccagcttaactaaaattttctgatacttttttcctgaattagggtatgttttggggggaaaaaacgcttcagtgcgtgtttctttcgacattacacataagcccccatggaaagcaaattgaataaatttactctctaaacttctttccacaagagtaggtttataatttattttctttacattatctggataattacatttggtttgcttacatagatggaggcgaatggttttccratcttcaaaccaacctatatcacaaaagcattctgaaaactgggaagagatcacttcacagtttcctgaaccactagaaaaaaaaaatgttcataaatttatagccgctgacattgaagttggagaaaagagcatatctagyacctatgctatgtggagaacactctccatgtctttgaaaaataagcacaatacaaattatatttgaggatgacctgccaaagggttgattatcctggaaacatgttttctcaatggtccatttgggcaaacaggccagctgaggtatctcaggatagcaacaggataagcagaatcgattgatgaaggagggagcctacctctggaggccccaggctgggactttgggtacagatgcacaggagacctttgccccaccccgtcacggctgggcctactcagttccacgtctttgagktttcacgcggaaactggatgtttcttacatcctcagctgcaggcatggggaagagacgcacatcagccattaagaaaaaggtatgcagtctacatgcctsttaatttcctccacatacacagtaaacccatcatgtccatcagcaccattgtcaaaacatstgtgcaccagtaaagggttctgatgtgtgataaatttatttagctattactcatctgaagttatactattttaggatcttggggcagtgaggaytttggaaatggaacaggatgctcctttaagttagggtaaaatgaagtctataaaaactgtttttctatatcctcctcctaccccacaaagaaagttagggtaatatattcttatataaaattgacatttttaactttaatgagaaattgcttgtcctttaaactttaggcattgatgcgcttaattatgcttttcaacaagattttgcatttttaatatttccttttagagcttccaggaatctcaattattaattgtaccstggatttattggtctttggactctcccgctagtataaagactgtagattcatcaaacattgtttactgtcttcaaacttcaacagtgttttaactatcaaatagaaaatcgaaaggaagcataaacgcayatggtcactttactggtataataggggccaagagccgttgtgttttataatttcttgatgatcctggtggtaggtaagccaaccgctatgaactctgatgagctctggtttaccccatagtccaaataaagaatggtttctgacattgtatgaccaaaaaaaatagcatctgcccaaaagatgctatttataaaactgttacaaatggagcttattgttcaccagaattttatgaataagtaatgaagtctaattttccgttatcatagccattggttaaaaatgcatgtctgttaggacattgtaattattttgtattacttaggaaaacttttatgattctactcttttaatttttttaataattactttatgacttcttcattagggwttctctcctccagtgcgtacgcagatcttctgaaaaggaatctgacaaatttagttgctgcatttttctaaattgctttcaagactacccagcacttcagatacttttcatggcccttttttcccaaagtgttctccaggatgccttttgatctgcacgggcaatcccattagcagtgatggcttaaggttcccacagaaactctgccacagaggcactgacaccagaccaggcgtgatccctaacagcttgctgtaccgactcatatgagggctgtcttggtccgtctcatttaaggtttggcttctccaaagattagacacccttgttttcgttcaacctttgtttggctttgaagcatcatgcacttgggtcttgaaatcttgggctcaccgctgcttgtaccagtatcttctaccctccggttgtttgtggccattatcaaacaaacaccatgccaactaggtgtaaatgcagactgatattctgaagaatccaggaagggctgggcatggtgcctcattcctgtaattctagcactttgggaggctgaggcaggaggatcgcttgagcccaggagcttaagaccagcttagggaacatagtgagacccctgtctctacaaaaagtaaaaaataaaataaattggctgggtatggtggcacatgcctgtagtcccacccactcgagaggctgtgatgggagaatcacccgaggctggggaggttgaggccgcagtgagccgagatcgagtcactgcactccagcctggacaacagagtgagaccctgtctcaaaaaaaaaaaaaaaaatccagtaggaaactatataaacactagggttgctttaaaatgtcaaggccaactcttatgatatgcggaagccttcgcccccttcttgagggtgtttagggattagatgagtgtcccatctgggtttcccatccctgcagagcccacgtgtggggtgctgagrggtacgtggtgggtgactccctggggagcactgtttggtactgatcactgtcccatcctggcactgcagtcctgggacagtctacacagctcctgcctccttcttttcttcaggattatctcgagttggtttgcaaagtgaaacgcattagacatcttcaagtgggctgaagaaagggactcaatttttgtgggtccatgttaatgtaattcttatgaatttgagataaagtggtcattaaagcctagaaggaagggaaaagctacacccccctgtggatgtgtatgctaaacttgattgatctgggcatatgtggaatttttacctttgttttgtctttatttatttttaaaattgaggtaaatttacttaatttaaaatttatcatttaataccatcttttttgaatggttaaatagtggatgtattttttctagtttttttgttttgcttaataggctctctctctgtctctttctttctatatatatatataatatatagaaagatatrtaatctatatattgatatctatataatatatataatctatatatgatatatatatcttattatatattatatatatagatagatatctatatacagatatctrtatacagatatctatatatatagatatctatatatatagatatctgtatacagatatctgtatatatatatagaaagagagggaactgaacgggatgctttttattttgggctgttattaggtagactctcctgggacattctacacagctcctgcctccttctgtatgtaayatatatattatatatatataaaatatatattakgtatagataatttatatataaatatgtgtatatatatatttgttagggtaaaacaaagtctataaaaactgttttcctttgtcattgcccccaccaaatatttatatatatgtrtatacacatatgtatatatgtatgtatagagagtctattatatatattacatatacataatatatacataatatataatagactctataatatagactctaatatgtagtctatatattatattataatgtatgtaatatataatatattctatgtaatatataatatattctatgtaatatatattaatatgtagggaatatgttacatattatgttgagagtgtatatrttatatatgggtttctatatattataataaacccatatataatatacataatagactatacacatatacagctaatatatatacacaatagtctagtatatattatacatgtaatatactttccatacatacatatataatttggggggcaaaaacatatatataatgaatataattatataattcatataatatatgtaatagagcgtgtatattatttacatatgtatatatatatatatacacacacacacacacatttcaactttcttgaactcctgaaccagccttagattgcctagtaccagggttcttctttttttaaaaaatttatattttattttaagttcaggggtccatgtgcaggtttgttatataggtaaactggcgtgatgggggtttgttgtacagatgatttcatcacccaggtattaagcmtagtgcccattagttatttttcctgctcttctccctcctgccaccctccaccctttggtaggccccagtgtcttttgttcccctctttgtgtctatgtgctctcatcatttagttcccacttataagtgagaacatatggtatttgcattttctgttattgaattaatttgctaaggataatggcctccagctccatccatgttcctgcaaaggacatgatctcattattttttaaggctgcatagtattccacggtgtagatgtaatatatatataatatatatataaaatatatattatgtatagataatttatatataaatatgtgtatatatatatttgttagggtaaaacaaagtctataaaaactgttttcctttgttattgcccccaccaaatatttatatatatatacacacctatgtatatatgtatgtatagagagtctattatatatattacatatacataatatatacataatatataatagactctataatatagactctaataattattttttaaggctgcatagtattccatggtgtagatgtaccacattttctttatccagaataaactattttttatactggttttaggctcacagcaaaatcgagtggaaggtacagggattttccagatttcccctggccctcactaccacatgcgtagccacccctttatcaacatcatgttaactattttaaagtggacagttgagtggctttaagggcattcatattgttgtgctaacatcatgaccatccatctccagaatgattttcatcgtgcaaaactgaaacgctgtacccacagaacactggctcctcatcacctccccaagcccagcccctggcarccaccattctcccctactttgtctatgaattcgactactcttggtacctyatataagtggaatcacacagtgtgtgatgtgttcttttgtggctgacttmtttatgatactggattctcagcatcatgggagttaggactgtctgtcgcaccatcaaacaggcatagctggctggctagaccatgtcacagggatgttggaactgggtggcactgactggcccagccaaggggtcaygcaggggactcctgattcattcctggggaaagtagttatgtcaggaagcacaggctatggctcacggctgtggctgtgcccacgtggtctgtgtgggctggtggtaatgggccagggaactgaatgggatgccttttattatgcactcttgacattttttatattaatctgttttcttctccatctataacatttcccacatgctacactgaagggatattttaagcattaattctcctaaaaagcctcatgcccaatgtaaaaatagttcactgtctcagaaaaaggcactctctataaatgaaaagcaccattattagtaatgtcaataactttcctgacatccatttgggcattgtatatgttttgataggattacataaataatgaaattgtatgcaaagcatcagaatgcaaaaggtgttttctccaaggtgtayacactgcctgggccttgtactctggccctcaattttcttaaacagctgcatcttttgggggctctgttaagacatgctactgtctttagtattttgccccctcaccgaatgatcaggagactggcttccccaatgccctgggcttaattcccagatatttattctgttgtggagtgattatctgttcctggattgtctcaaaggcattaatctttttggtatccaacatcttgaatgcttctgtgtcattttcctttctttttttttttcaaagcacttaattatttaaaaacaaaaatmcttctctgatcagagcatacctgccgtgctcaaagcacttgcttacttggaatgccataaattacatgaaggaattattcattgtatcacgaaacataccttccagtctcccgagtagtstattaggctaagtatggtcttttaaattattactttaaaaataaaagataatggaattatagcattaartacattttgcaaatgatcttctagtaggattattgaaagacagtaaaggcaagtataaatcagaagcaaaatcattgtcctctaattcattaatggttaataatattgctgactcttttaacttgtcaacatttcctacattcaacattgtactctaatatccagtaaagtgaaacaaacaaacaaataaatacacttttttcaagaaaaaataaatatctgtgatctcatcrtttgaccgtcagtattttcatttttgcatgtgccactttaatttccctaggcaacactagctagtggcccacaataagacgtagaaaacaagaccacgtaccttccagaatcattggccctggctctactcctggaaacccagtccatctctaatccctttgatttccaatgggaggcaaatccaggggagttctagactgtckagaatattgtaccaagaacaaaaggccaaccccattagacagtggccaagggaggtgaactaaagttggtgctgtgaacagggctaatggtttgtgatttacccataagtggaaggtrtactccggctgctcctttaatattttatgattagcagtagaggtgtgtctgggggaaagagtcagcttattttatttatttattaattttttgagatggagtctcactctatcatccaggctggagtgtggtaggtgggatcttggctcactgcaacctcgtctcccgggttcaagtgattctcctgcctcagcctcccaagtagctgggagtacaagtgtgcaccaccatgcctggctaatgtttgtatttttagtagggacggggtttcgccatgttggccaggctggtgtcaaactcctgayctcaggtgtwccaagaacaaaaggccaaccccattagacggtggccaagttggtgctgtgaacagggatcctgcctctgcctcccaaagtgatgggattacaggcgtgagccactacacccagccaagaattcagcttcttaaaggagctgcctcagactgtctcaagatcttagaaggccatgcctacattgccaccagcatcccttggctttttgcttggcttaagaatctrtcttttccgttcctccttccagcatactcagcacagtccacctctgtggtctctctgtggttttctttctgttttcctgctctctccatttctcattcaccacaccctgggctatctttcactctctatgaaataccttggatttaggaattggagatttccttgggtcaggtttcaccctcttcaagtagcgtctcaaacagtatacccactacagctttctccccastctgtcaaccatgccatggggcctactttttgccctgactcccaccagataatgcccatcagatggcacctcttttggctgaaaaatcgaaaactcatcactcttcctgcattcattagacagtaccctttatgttcaactttgtaatttaagtcccattcttgcctcatagaattattgcccgttgacctccatataagtatctgcatttgctgcatcattcatgacatgtgaggcctttgacaaaccctcctatggtgcagcttcctccgagcagstcctaaggaagtgccagagtcagggctttcctctgcctgaattatcggagctcttggcttaatgtgggagaagagatgaatgatctgtccttctatgaaaggcttaccaactccattcaattcacagtggctctctgaagctctgtttttggaaggactgtgaggctgtacctgcacttgattgaacgagtgctgggattgattagtgatgtctgcagtgagcgaaggattgggaagagtaaacaggcatgctgcatatctgtcatcatggctctgagtgtatcctgtttcagaagagatgaactgtgctgtagagatgttagcatcaggtattttagacacatgaagagaggatcagattcagtggaagtgccaaagggattctttcagatgggcaataagtggttctgaagatacgtatttctcagtgtgttatcttggctccatttagccacacaaaaggaatatgggtatagtgatgggtctctcatggctcacgtattaactgtatttgttgttactgcttctcaggcactctgttaagaatgcagggctcttcctcagactcagsgcggggcctgggctttacagcaatggttttcagtttgtaatctctctcaaggaagggagaggagcacaaagctgccttgactgccagcaccatcagaaaagtgacagcagtcttggccctgtaattgccaacagtaattcatttgttcgttctctctctctcgctcctgctcctgactctgggggatgcttcttttcctaccctgcctggaaagtgctggggcatgggtgaaaccagaatggttttgattctcaagtctttttgtagagaggaagaatggatattcctagggtcagttgattgagggtgtgttgggggaatgtgattatcgatgatgctgtatgctgggtactagactgggggttcgttacatcaagttgtggggtctgtggaaaggaagttgtcataggagtctaggactcagcagctgtcaccttcccaaagtcacactgctgatgagtgacagagaccacatttaaatctgtgtgtttacaaggtctacaactgcaycctgctacctcccagaagctgaggcaggatgggcaggttgccacaccctcccaacctcctgcaaccttagttgttagtgaaaggttattaaataggcctcacaatcgcaagccaggtaaatatgtcattggagaggttggttttgtttgcatttctggtgaagttgagttgtttttatcccctacaaggtcatctagacatttttatccccaaggtcaggagatctttctgccagaggtcagcattccatccagctcctgcctgctctctgggtggccgactgtgccagtagaaatgccagctgcagccaaaggacaggctttccatccgagaaaagcactcacactcgcatttcttttctggttctgttcctcccctacataaccagaaaaagctcgttaacacatgatggcaaccaggctccaatatctgccagttcccctgtacagattcctctttagcattctctcggcttccctcctcaacaattaattcagatgagcmgttgggagagtgcaggatccagttcaaaaggatctgtccccccgtgaaccccaggacagggtgagaggccacctgcacactttttttttgtcasctcacaccctgttggccctttgcaaatatttgtctttcctcatgcacgtgkttattcccagaaagatccagtgaattgtctcctgaagawaaaatacataaaagggcgtttcaaagtataaacagtgattttaatgaaaaataagaagaaaatgcttatgatacaacattaggtggaaaacgaaggaagaaaaattctgtgagtctaattatggaaaaaattactaagatatgttttaacatgccctagacatgcacagaaaaaaaagactggaaggaaatttattgagatgttattgtttatgagtgttctaattatgatttttaacaatatattatcagagttttctgacaaagaattaactttttattttttttgagacagagtttctctcttgtcacacaggctggagtgcaatggtgcaatctcagctcactgcaatgtctgcctcccagattcaagcaattttcctgcctcaggctcccaagtagctgggattrcaggcacccaccaccacacccaactaatttttgtgtttttagtagagacagggtttcaccatattggccagactgctcttgaattcctaacttcaggtgacccacctgcctcagcctcccaaagtgctgggattacaagcatgagccactgtgcccagcctagraataacttttaaatcagaaaaatacattttttaaaaagatgtaaagcatacatagaggataacttacaaatctgcatttcatgaccacatatatctattgagttgcccctaggatcatttttttcaaagctaatgtctgccacaaatgggagttttaataggttataattcatatgacttagtgttaaacctctacgttggkattcttaaatttaacatggataaactgaacttgatttcctgcattaaaaaaaattaaagaaatgaaagttctgactgttttattgtagctggggaattctttttgcaggtgaygctcatgttacggttttgaacccaggactttgcgttgcagttttgttcaggggttgcagaataccgatctgactttgcaggaatgactgtcttggtgcataagccattaacctctctgcgcccttggattgcctcctctcctgccagcagaagccaagtcacctcatctgtaagggagtttcattgaggactaagtgggaccaggccgaaaacgacccccttcccccataggaagtcacagaacagccaagccctggaacaggaggagcagcttcctcctgggcacagctgtgcagaaccagaggcgacgcatttgcccatcgtaaaggctgattagaaacagttgggtcccaagcagaatccttttgcccatgactgtgtccatggtcgaggtgtccattgtcactgttgccagatgccagcactggcgagggttttgccttcctaccgtaggcttcttgacccggcacctcggaaagtaactcctgtccattgttccttgtgccatctttcttaagaaaacatgaggaggagcagggtgatgctagatggaagcaggagagcctggggtcttagtttcagtggctctgacttcagttttctcacctcgaaatctcccttctctgaacctttttgcgtgctcttctgtctgtctgatattcatcatctgactcatctctaccagtcaggagttgcttcttccaggaagccacattccatggactgatacgctgggctccatgccatcctggggttctcttgagtacatctggaggggtgtagtgtgttgtaaatgcatacgatcatgctggtacatttcatcaaaggtggcagttacactaccagttgtgtgcccttgggcaattagcatcaccctgctgtgcctcagtgtttccatctataaactgggtataataatcattcctaccccataggttgctgtgaagattggctcacatcagtmatgtacttggaatggatcctggcataaaaagagcccttggaaaatgatagcgttcatccttggtatgacctccaagttctttgaacctcaaagagccaagtcccacatctcaggtacatttcagttcattctttctgagttgatttttttttttttttttgagacaaggtctcattctgttgcccagactggagtgcggtggtgcgatctcagctcactgccacctctgcctcccaggcccaagcgatcctsctgcctcagcctcatgagcagctgggaccacaggatgcaccaccatggccagataattgttttgcatctttggtagagacaagscttcactatgttgcccaggctggtctcgaactcctgagctcaggtgatctacctaccttggccccacaaagtgctgggcttacaggtatsagccactgggcctggcctgagttgataatttttrtcatttmtttctyacttttctcaggaaaatcatgactgtaaaacagatcagttttgctttagttcccaccctcatcatcaacccctccccagctaccctgcaaaagagtcacagatcattgggataactagaaccacagagatccccctagacttgtcagccagggaacctgacactcttagaccttcttctgagtgctttgtccttgtccggagagctcggggaggagcaaggttgtactgggatttttttccgatcacagaaagtaacttagctagctgttgcccagccaatttgcccaagggagaggttgctcctgggttgcaggacgcatccatggatggagcatgggttttgggctgtggggggacaatgaggtggttcctgaaatccctagttactagcagacaagtgcatcagacaagtgcatttcaccgttctgagcttcagtctcttatccaagcagaaacatggccagaatgcaatgtcctaatacatgtaattcattacgtgtgttgtcatgtaatgtaacacacctattggcagtctctgacacaatacagatattgaccccatggtcttgccccaacttaaataaaaataaaaacgaatgcaaaagaggaatcttctttgcactcgtgtgatgtctgttaattcttggctttcttccttcataaggttaatcatctccctgtcacccctcccgcttgtcccccagcctctgtgtgtcaccttctctctgagctcaccctctctaggaagccttccttgctggaatgcccattccctgatataaggattccacccaccacgccccttgcrgttccttgccggtgtcctgtcctgggcagacataagccctgtgggttccagtttctcattaggaacctggatgatggagcagggatcatgctcattaagtccgcagaactcatcagctgcttagcagggggccaaggagggctgagcctatgacgggtgaataagtctggttggcctctgggagtacgggatcagaattccaagtgactggggtcagtagcaggccaccaagagccatcccacctcagaaagacagaagccatcactgcaaatggcaagggcatgaggcagtttgaaactggcaaaactggasctttcatggaatccagggcttgagctttaatgctttacacttttgttttttcattccatacgcttttgctttagcttcctggcaaaattcagacaaacctagaagggataataacttacattcaacctctgcttgctctgtcctttctcacacgtgtttagagaaactggaggagcccgggaactgctttctcctctctaagagtcttggtggtttcttgtgtggaaatgaatgggaagttcaccctggttctgcaaaatggktgcgaaatgtaaaatgtatataccttctatcctactctttatgttccacaaattttggagggaaactgattaactctctagctaccatgttccaggtgcctgcacctgcttgctcttggttaacctgcacccacgttcccccgcctgtctctgaagtattcacaggtggaggctcagatgcacacagtgattgagtgccctagctggggttggaaactctgtccatgaactccaaagcccacgctctcttacaccctcccaaaagctgaggcttcctcactgtcttttgcattatgtcatgggtggaaacatgcaccttccctgaccttttggcttggaacatggaagttcattgactttgttgcctagcagggcctggagctgggtttcttgcctgatcaatgtatatcattttgccaagagacagagtctgtgctggagagattgattccctggttatttatcttcctctgcccagtgtaaattggtcagcctgatcctattcgcatgataaaaatcataatgtctcaaattacttactcaataaaatgtgggtttgtctattattagtgattattagggttataatgcagcrtggaaatttggagcaaattaactatacatgcaagctgttgggctcaagtgcagttaatcatacgcatacagtgccagtgggcagaaggttttgcaagaatagcttcaggaagactttgtgggaagacagatgaatactcagggttttttttttttttttttttcttctaayttgtcctccttgatcaggatttctcaaatgcacatttgtctaatatactgttgaaccrtgcaagtaccaaaacaaaacaagaaacccagaattatagctcaaatttaattaaaatagcttttattgcttctattcatgtgtccctggattttaagtgatgcrtcagaatttcatgatgagcaaatgcctrtggatgccctcatttctcatccttcttgactgtctgctaagattcactcttggtcttgtctttgagcttttctgttcagtgatgtaatgggacaggctctcctgtcatcaagagttcccatcatacctgggcactgccatttcctctgtggtagatgcttcctggacacgtgggcaggtgagaggtgctgactttgcctacttgcagctgaagagaagagagatgtagctttgaatggccacatgagtgtttttttaaatgaaaaaaaaatctatgtataacttgtttcctgtgagggtgccaggaaactttacaatgarcttcgtgaattaaacctctaccagatgaatagaggtggtggcatggtagcagaaattaggrttaaaaaaatggtttttgatttatgaaaaatttttctgcaggaaattttgatttgttctttgtggattctgaggataaaattaagaccaacattgaggatgagagacagaactgaactcaacttaaaatagcttcagggaggaaaagcaagtgcattagataagtaagtgggaagtccaggggtagacgtgagttcaggcatagctggatccaggatccgacagcttgcatgtgtagttaatttgttccaaatttccatmctgcattataaccctaatgtttgctaataacacacaaacccacattttattaagtaagtartttgagacatgatgatttttgtcatgtaaataggatcaggctgaccagtatagactgggcagaggaagattcataaccagggaattaatctctggatccaggctgaaatgatattatcagacacctttctttctctggtcctcagttttgatctcttctctgctagctttattctaagacaggcttagatgggatgtagagagcaaactctggaagtggagtacctctggcctccaaggccagtagttgtagcaaaagtccagggctgccgctcattcactctgctcggacctttctggtcacttgtcttctgtggtttggtccttgtggccagggacaatgaaactctcattgattaggcctgagttatgtgctctctcctagagccaggaagaggcttcggccctgcccagacccggtggcctgagagtcacagtgaggcgcagctcccaaagggagactgaaatataagcaaaagaaaaggaacacgtactgggaatcccaaacagcaaatgttcactgtgttcagggaggagtcttcaggcccacagtgtaggcattcaacaaacgctcttcagggagaaggaaagttaccatcaaaatccgtcgttgaaagtattgaagttccagctggyggtctgatayagcttagatgttgtccctgcccaaagctcatgtcaaaaggtaatctgcagcgttggaggtggggcatggtgggaggtgattgggtcatgggggtggatttctcatgaatggtttaccaccatcctcttggtactgtcctcamgatagtgagtgagttgttgggggagctggtcatttaaaaatgtgtggcacagccccccaccctgtctcttgctcctgccctggccacatgacgtgcctgctccgccttctccttctgccatgattgtaagcttcttgagacttcccccagaagccaggcagctgccagtatcatgtttcctgtacagcctgtggaactatgagccaattaaacctcttttctttataaattacccagtctcaggtaattctttatagcaatgcaagaatggcctaatacatggtctctsagcaggattattgtagaggggactgatgttgaagaatggaaaagaaggcagtgtcagagaatgctgaagagtgtggatcttaaagtccaacctcaaggcccagcgctgccacttaacagctctgtgaccctgtaaagtcactcagcctcattgagtcccccatcctcccctgtgyagaatgaggctaatgctagtgctcatttcatagagttgctacaataatcaatgagataatgtgcataaagatttacatacataataactgctcaataaagggtagatgttaaaattagcatcagcgagctctagaagatgctaagttctctggaaagatcagctctgctcctgtcaatctctccaaatgttagattttgcctcaaattttaggcattcgttcattcatttattctttcgtaaattctatcgcattaacctttacaagtgttaaattaaatcttttccccaaattatgcattagaaccaagttcttatgtggtggatgtacctcatttcagcaagagctttctaagggtacagaattaaatatgcagcctctgggattcagtgatagctcatgggacatttgacctacatggaaatgcaggctggagttgcattttaattggcaaggatcagcccagttgtccagcttgtagcttggagtgtggcctggctcccactccagagagatgtacatcatgatctgcgtgggtgagaggatactctcaggaaatgggcaaagttgccagctgacctctccagaaagagagactatgttgttagtttcccttacttggatgagaaatttctccattcctagtctcattttcccaatagaacacggaggcagaatttaaagcctcaaaacaatctgatgcacatcagctatcaatgaaaaggaccagcttggaggcagaggcacctgagttttgcatcttggctcaatcacttactaactgcattgtgggttaacacagtgtgtgtgtgtgcacttactaactgtgcaactgtgggcaagtgatgtaatctctctggagctcgtytttccttttttcttttcctttttttttttttttttttttttttttttttttgagatggagtctcactctgttgcccaggctggagtgcagtggcrcaatctcagctcactgcaacctctgcctcccgggttcaagtgattctcctgcctcagcctcccaagtagctgggactacaggtgcacaccaccatggctggctaatttttgtatttttagtagagacgggctttcaccatgttggccaggctggcctcgagctcctgacctcagatgatctgtctgccttgccctcccaaagtgctagaattacaggcataagccactgcacccggccacagttttcttttctatattgtagggataataatcctcccttgcaggactgtgctcagcacatgttcattgctcaagagaagtagccactgttattattattgtcagtatgtatccaagtgtttagttcattttctctgcatttgtctaactcccttttttcccttgaactgtaaagctctcagcccagggatatagtagcaccagcacatagtagatgatcaagaaaaattagtcattctctctggttcttcctttcctgtatcctgttgtctttatcagttcaggctgctgtgacaaaagtatcacagactggatggccttaaccacaattgttttacatggttctggagactgggaagtctaagattaaggcagtggaaggttcactgtctggtgaaggctgggctcctgattcatagatgtctgcccttcttgtgcatcttcacatggtgggaagagggtgagagagctcaccggggagtgtttctcccagttcctccccagtacacagaaaaacaaagctttctgtctcaccaggaggactccacggtgagcatagcttggctcmgcccagcaggagattttgaaccgactctggtagattcttcctgcagccattcagctcccacctctttctctcaaaaagaaatccagggctgggtgtgtgtgggcaacttcaccctgctctctttgtcccccaggcctgcactacaacaaatgtctctttgtgtccaactcttcttccatttctagtccttcttttctcttcttctcgtacttcccatattcctaatacgattggttactcaaattcttaaacaactcacaactcattatctcccttccatgtaaaagtaacccccagcctgagctacctgaccccgtggtttaaacaataaagcaactgaccttttatcagaaatttgcaaagccatttaatttacatatgtccttggcatccacaaatattgcttctcctttcaaccagcatgccacccttccagccattcacatatgtattcattcattcattcatttattctttcattcagtcaataaatatttattgagtagtaagcacatgcaaggcattgagggtggggagggaaaragacacaaattgtccttaccctcatggattcaccatstatttaamggccacaaatacttgtgtgagaagcaagtcttaatagtctgaagtrttttcttagattcccttgagccgcaatgctgaaaagcttatggtggttttgctaatgaatttgacaaggccagaaatagaccagatgaagattgatccattggttaattgattaattgattgatcgactgaggaatgtcagcctggtctaccaaggtttatgaaagcctggcatatagaaatgatgtcgttaatgcacaaatacctgcatcctgtcttgaactccctctaggggccaccatgtgtatcagtgtcctgtggctgctgtaacagattactacaaattttgtggcataaaataacacaaatcgattcccttacagttctggatgtcagaactgggtgactttctcctgagactgtcctgattttttttttttttttttttttttttttttgcttgtcagtttgttttgggtgatgcagatggaaggtaacgtcacagggcagctgtattccaggtacttggtgactcttggttgcgatctgatgactggctcacagtaggaccatgacgtgagcagatttgtagtcctgcatraatgaaggaaagaaagaaatctgacaactcattgattcagattcacagactctgcattttgaaccagaatacacccgagcaattacctagcacaaaatctcctgtctgcagaggagttgcaggaaggagaattcactatatcctctcctgaaaatatcccttgtggtcaaggtggctatagactggcatccctctgctccctaagatgccagggactcacgtcttctaggatatcaggggaagatacagggcaatgggcctcagatcacagacacggaaaatcattttctatttcatggagcatggagaagcttccttcaaaaagctagccttcgactttctattttttgaactgaagggcaggccaggagggagctgacctgtgtagagcttggaggttgtgttttcagctgagaaaagtgatcctgaacctctccatccttgcaaagctcagatggaagcccaggggccccagccctccagccccacacacatgccggtgcacctggactgccactctacctgtttacaaattacccccattttctgcttggttcagcagcaactgattaccgtcccccgtgatgtaattagggcttcagagttcacgtgtgtctattatgagctctcctgtgctttgtcttggtgcttcgtttctgtagcagtaatcatatatatatataaaaatttggtatcaattgtttggctaaattatgcacagtgggccatcctaacctgccattaacataacgtatgctaaagaatgtgttgtgtttttttsttttctctgataattatactctaaagcatcaattgcttatttgagtaaattaaactttgagttgttcttatttcttcaaactttcaaattgtcttgcctgcagcagatgcagacccagcactccggctgctgccagtggaggcaggagcctcgttaccacctttctgagaaattcaagtgccacacagtggtcaccagcattgtagctgccctgatgttccgggctcagctgcaatatagcacatctctaccaccatccccagagtgacctccagaactgtaagggacccccgcctttggtacagagatgggagttaaacacaggtgtccactggagtcatgattcctctattccctggacaaatatgcaatgagaatccctgagggacaggcactgtgctagatacccgagatacaaaagcgacaaggtttctatcctctgacagtttatactttagtgcagtggtcagcagactgtttctgcaaacagctagatagcaaatattttagactttgtgacccatacagtcaccatcacaactattcagttctgccagtgtaactcaaaagcagccatggctgttacataatgagtggctgtggctgtgtgccaattaaactttatttacaaaaacaagaggagggccagattttgcctttgtcaaggaagtaagcataatagtgcaagcagcacgtgcccgctctttcacactggggcaaacacaggggatttattcggcacaattgagtaatgtggatgaggctgctcagggctggcagttgtaggacgcaaaaccttgaggggcatcgatattctggtacagctgtcacccatttgcagcacagctgggacactccacagagaatgatcaggaaggccaagcccagatggcattgttgaggggctttctcttaagactgcatctgagtggcagggcgcagtagctgacccttgtaatcccagcactttgggaggccgaggtgggtggatcacgaggtcaggagttcaagaccagcctggccatgatggcgaaaccccgtctctactaaaaatacaaaaattagcctggcgtggtggccggcgcctgtaatcccagccacttgggaggctgaggcagagaattgcttgaacctgggaggtggaggttgcagtgagctgagatcatcccaccgcacaccagcctggscgacagagtgagactctgtctcaaaaaaaaaaaaaaaaaaagttacttctgagttaaaatatgaagagtgagcagtacccagccatgcagaaggacatggagtggtaaaagcatgtggttccattaagggaaagactccagggcaagaaaaaaacatgtcatgcttgtacctgagggaaggccagtgtgattgcagagtatggggcaccctggaggtctggaatgggaggagtttaaacaggtcattagagcttcaagatgaagcataggccagtgacttggttgctgctgctgcgtaaccgtgtggcaactgagtggctcacggcaatcagtatttacttctcacgtgtgtgtggggttcagcagaactaggctgggcttggctgccctgccctactggtcctgctggttttggtggggcttccccctgtgtctgtgggtcagcttgttttgctcctgcatctttgcatcagctgggctttctgccctaggctggacatgggtggggcactttagctggggtggttctcctccacatgtstctcatcttcctgggaccagcagggctagaccagacatgactttcttatggcaagggcagaaatgcaagacagcaactcaaaacacataaggactttcaagtctagacccagaactggcatacccattcctctgtcacacactgatgccccaaataaatcacatggctgagctcacggttagagagggaggatactgcagtcccaaagcccggggcatggatccagagaggagggtgaagaatgggcccctgacccaagactgcacttgtatttgagttgcataagaagctgctgakgaattttaagaacaggagtgacatgacttccgttacaattgaaaaaatcaatctggcgaaatgaatggggctacataggttgggggaaggaggtaagagaggaagtgaggagaatagggtgggtcgaacctgttgaaggcccagagcttgcttctcttctgccgcctttaggaaacgagatgaattgttaaacttcttgcactgagctttaccaggtgagctgacagttatcctctgcattcatcaatataagccccataaaaggcaaagtggttgaggagaaaygagaaattacagcccagattagcagccttgagtgctccttgtgaacacaagacactsacccaaatcacacgtcacggctcttcgcccattaacgcttatagcaggattattcccaaggaagctgtagccattatatttgctgccatcacaacagtaaaataaacaggtgtgaytgcagccctactcctcgggttgtttcatgctgatcagttgttaatatatgtgtgacttgaagttggagcctgttgggagaaaaagttgtctttagaggagtaaagtgttgccttgctgtgggaaggggaaactttttcttgggaagtggactcaccaataatttttgcatcatgcgcaggagaccctactaaaacstaagtgtgcaatgctttaaatcagtaagtttgtttttcattaacataaaatccaaaacaggtgctgtgatcagcaagccgctgtcctccaagtggtaattcaggaacccaggctccttccattctgtggcttcaccttgaccaacgaagaccttttgaggttgccacattctccaggccactaacacttatgtcattggctacaactcagtcacatgaccatggctgcctgcaagggaggctgggaaatatagtttgctgtgtgctgggtgggtgggagggagcgtcmacattagtgaacagccaggcagtcgctgcctcamatttctttagkgttatcctttcatkccagcaattgaatttgatttgcactgtttcacttctctacaagggtgtaaaaagtagaggttcctcttgaaagaatttcctccccatctaattaggaataaatagtaacttctcttagaagcaaagttaattcaaagacctgtgctaacattcttaaatatctgctagctgtaatgaagaaatcaatgtactttatgttcttagctcccacagtttagcctaaatatttgccctggcatgcttatactggtccaagcaagcattaggtcatagcctgttcctcttccttatttgaaggtgtttttacctttctcagcattccacaagttacttcgtccttcctttgttctcctctgcctttgcctcttttttctttttttattttaattttttttttttaattatastttaagttttagggtacatgtgcacgttgtgcaggttagttacatatgtatacatgtgccatgctggtgcgctgcacccactaactcgtcatctagcattaggtatatctcccaatgctatccctcccccttccccccaccccaccacagtccccagagtgtgatattccccttcctgtgtccatgtgatctcattgttcagttgtcacctatgagtgagaatatgcgttgtttggtgttttgttcttgcgatagtttactgacagtgatgatttccaatttcatccatgtccctacaaaggacatgaactcatccttttttatggctgcatagtattccatggtgtatatgtgccagccatcccgttactgggtgtatacccaaaggactataaatctttctgctataaagacacatgcacacrtatgtttattgcggcattattcacaatagcaaagacttggaaccaacccaaatgtccaacagtgrtagactggattaagaaaatgtggcctttgcctcttttaaaaagttctaagttgctagccagtcggracaaatacagaatgtgaggtccctttccagccaatggaaaccggacacagcagtagagtacacgygtcaggttataaatgagcctgtctcctttgtccggtgttctctcatggcaaaactgctggcgagtgtaccctttctgcagaaagtaaaaatggccttgctgaggaaattaaattcctgttcgagtgctatttctttatggcactgaggagcaagyatttctaacaatcatattgcttaagaagtggatggcargaagataattactaatatgtctgcaattgatctgaaattgacacagttgatctawctgattcatggggaccctgggagtatgtttgtgtatttgggggttgggatgggggggtgggtggagggtcagagaggtggcaaaagcrggtgggaacagggttacagagcaaagtaattagatgccctttagatgctcttagttaaagaccatgcaaaaaggatgaaatcttttgatcatgttcttyacaatattagaggtaaaacatgaactcaacgcttttaggaaraaacaactggattgcgttttctattttattgacagaaactagatggggaggccagggtgtgttttattattgcacacatacgtaattacaaagtctttgcttttttcccctacataaatttattttgagatttaatttccaccaattagaacccgaatgaagccgttttaatgtgattcctgcatcccagcaacgtggccctgcttcttagtgcgcacgtaaagaaacaatcctggagtgaattttaagtacctaaagttgtgttagactgcaaatgaatatccaattcaatttgtaggaaactttagattaattaggtttataatttgcacagtaaggtaatgtaaatgtgttgctacggcttgactttttgcttaatcctctgagtggatatttaatctttttaatattagaattaaagcaacttggaagatatgaatattaatctaattatattccgatcactttaatttctttaatgttttaaataacaaaacaactttacaaattggtttaggttggggaacgcttttagaggattttgcatctcatcagtaagtgcaatttagaggatgcaggcttgggaagctgtaccttaagtttatagttatgcaaatgaaaaccattaatcctggagcctctgacttgcaaggtgtgcttcagaaatttgcagcttctatttaggyaggaagagtttgccagcccgaaaactccagtaagcaaacagctttatagyaccccagccatagaaagtgagagctttcgaagaatctgtggttagaactaagaggatttttctttctcctttttctgctgttattatctcaaggagagagggaaaaaaaaaatcagagcaggacatgaacagtgcttgcaaattttattacctcattataattgatacctgctctctgagccaataaaagaagctatattcagcactggctgtataagatctttaatgttttaggctgtcaatgttggctgtggttaggctgacataattrtgagctgcatgtaccaatatatagctctttacccacaaaagcatgctgcaacggggaatctttcagagataataaaaggattcatcaagtgtctatacgatagctacttaaatcgctattgttttagttaggcccgcaaaacatatcccccagctatcccggtttcttatctttcttacttgatatttcaggaatttcaagcttttgtacagcttgttcagttgcatcctagaggaggaaaatgcttttggcgtgatttccatttcaagatgacaacagggagaagtctttccaaaatgcgcgtgttgcaatttcagatttaatcaggggaatacattaatttctggaactaattacagattttaaaagagtgatgggtctggtacagtggctcacacctgtaatctccacacttggggcggtcaaggtgggaagatcccttgagtccaggagttcaggaccatcctgggcaacatagtgagaccttgtctctatgaaaaaatgaaaaataattagccaggcgtggtgtcgtgtgtctgtaagtcctagctactcaggaaggtgaggcgagaggattgtttgagcccaggaggtggaggctgctgtgaactgtgatcacaccaccgcactccagcctggatgaaagagtatgacctttgtctcaaaacaaacaaagaaaaatcataaaagggaggcagaaaattaactgaagaaattgtgttataaaaggcagtgttttaagttctagaattaaaagcaattgcagcaaataccaagtgagattttctgtattttgagagtttgtgtgtgcaatggttttccactgactaatcaggctgataaaacaacctgaaaatggctttcccatggagtttatatatttcgtcagagacctaaaatggtataaatgttcaataatagccagtgaatataaaactaaataatccatatgagacaaaacaggtagaagaaaaaaacattcctcctcagatatgcaccttttaattgaataaagcaaacagtaacagtgattaccaggacacttgctgttttctgttattttggtttatattgcttaattagccagcctttctaattaacattacattttgctgagttcacattgtgataaagawgaatatcaattcttttctactcatctcattgagagatagagttgaattcatcttcccttgtatctaggctgcacttattcgtttgcttgaccaatggaatgtggctgagtggccgtgtaaaatgcctgactaccctgagactgccatgttgaaggaagcccagctagccatgtggagaggccttgtggagcgggaaatggccaacctccatccattggaagtcatcccatttgaggccctagatactgaaaatcagaaagaagttacttcccattccccacctcaaggccctgtccaaactgaagattcatgggcagaataaacaattgctattttttaaaggtgtatgtttggggttgtttcctacagagcaatgaataaccagagcaaacacccaagggcaataaattatgaatagtgaatttaatttttctatgtgacctatggaatcagcctattttatggcagtacaaagtatatgtagcaaccaaacagtttcttctttcctaaaactcaaagtgagtcagacttcttaggcttgtagatgttgaggactaagctttgctctttatmttctctttatggatttccctttggaagcagggataagaagagrgaaggtctcccagatgtaaatttctcataaatatttgagctccatttcagtaattcyttcattctctgatctgttgcctaatcttctatttagcaagtactttccatgaaatagaaggctttaattgatagaattactaatttgaatagcttagcacagctcagcttgtaaaaaaaaaggaaaaccactatccccattaaattctcatcttgtaaaaccagccatcagcacctccctgtctttttactaaagtttcccttctttggtctttagtgctaagtaataggctgtcactagaccaaaaaaaaaaaaaaaaaaattcagcatttcttttcattggaggttaccccagaacacttaaactttggagaggaaaatagaacccctgaagaaaagtgaattctcatgacaatttgtacattctttgaagaatgactgtaatacatggaggagttaccttggacccatgtgcagagtagtgtcgtgaatgaggcctgtgccttgtcctgtggtttaaggataggtaaatgtatctggggcagagggttgcctgggacaaaggcattataagcttattcatttaacttgagtacagggtttctcaagctttggcactgccaacatgtggggttggataattttttgttgggatctgccctgtgcattgtaggatgtttagcagcatccctggcctctacccactagatgccagtagcatcccttccccctcttgtcacaaacacaaatgtctccaaacattgccaatccccctccattaagggtcatgtctcttggctgggataagtcttctctaccgtatccctttaactcaagaagtttttcttgctaagtttatgtgatcttgaaaatacggtgagattgaacttgattttctttaaaggacaaatatctgcttcttccaaattgtcataggaatagttcaaagctaaagagcctttcaggcaggctgggcacttcaaacctacaaaacatagtgctaaaattaaggagtgtatagtcgtgtgtttatagggacaggatatttattatctatcacttttgaaaatgtcattggcattatcgttcacttttacaaatacgaaggaaaaatatgaaggagttctagaaaacaccagaagtgattttgccgccatgggcctgaattgaagagcttaacccactaatctgttatgactgcttggggagtgctagcgcaggttctctaacacactgagagtcgtttggagggtagtgtgaagtggcgttatagttctccttttaatggttgagacaagaattgcctggacctcttttaggatacatcaccagtcttccaatggcaaacktatgtttattccagctgattctccccagcatgggggcatgaattgcagtggaaatcagtggactagaatttggatgcaattgcccccaaattatcgaagagaaaagaagaccactgtaattcaccggccatagcatttttaccaactgtttttgctaagcattagtttcktgtgataggttcaattctcaggctccttctcrtyagagtctttctgtaaagaccattattattkctgttatatttcctgtggctgagctgagccgcacttggagatttgatccattttaactctctcattgccttcagagagttggtgattttggggggggcaccagtktgagtcctttgatccttgaatgacaatttggatttgtctcaaggtcctgmtaaatgggaactggaggaactggcctactatggtattacaggctagcacatggtttgcattctgagggagctcagaataggcaaggtagaagacataggtggtcaagaatttagaaagacccggactcgaatcccagctctgatccatctcagctctgccatattgccaagttccgctgagrctccatttactcacctgttgtatcatctgaattatttycatatccataatgtgcaaggatatccttccatgttattagaaatacagatacaccatcattatcastggccaaatcattcaaatcgctgtttgcttcttctcgggctcttattcaagctcacgatgctattctcatagtgattgcgaatctcactgcataaaggtgattttgaaaacatcacttttcctccacactaatgtgtgagcttagccagagtaggagatatatcttacttaaaaaaaaaaamaamaaacaaacaacaaaaaaaaactccttcttcatttgttatagttccaggatagagtgtgtacctgkatagagagagtcaggcagatayaggtgtgccctccttccaagatgtgtgatggtgggcaactttctttgcatctctgagcctctattttctctatataaaatgagagagaaaaaaataattcctagatctagagttggtgtgaggctaaaataagctgcttttagtatcacatttggcaagtagtaaactctggataaatatrcttttgaattgtgtgattattgttgttaccatttattraaagggaatgatgaatgtagtgagagaaggaaggaagagagagagggaagaaggggaaaaagagggatggaaaggaggaaggaaggaaaggagggaggaggcaagtatawtagtcatgatatakggaattgaaaagacattcacrttttgtggtgaatgaaaataacttgacctttatgaagctggcctaatccctggaaggaaaaaatttccttggatatgtgatttatataatcaatcaactagtccttattttggtagagctaaacttctgtctttgggtttactcaccgtatctgtgtgcatcctggcartgtttacgatatacttctactaaaatattattttattctatactaacaaagggatttgttgtgtrtgtaaaattcaaatttcaatgaagattgtgtatttttatttgctaactctggaaaatgtgtttacagaagaaccagagaaggacttactcctctccgtacactttggacatgtcaaaatctagaaatagagatcagtaaaggtaacacatagcaccttaaatctgatttaaaaggaaaacaatgaytattatasagatttatggcttcttgtcaataatactctgatttctggagattgttatcagtcataagctttataggaaatatctcctwttgamaatgacattttaaattaatgtgaaattgtgttttaatttaattcacagggagtcataaacaggtgggagaattatgkaacaataattgtgtttgcaagaaatggatttcatcctaaaactccatgaatatgctattacagtttgttgtcatcctgaaatgctctgtttaaccataaaatacagcgtaaaagacaccctcatgttgaagtccttaatctagtgtgtaattgcttaagtgagcacattaactatatcgtcaactacctgttctcaaacactttaacaatcagctcaccaatatgggtgtgatcttgacattgagatgtagagcttgacacctgcatataaagtagaaactcaacagtgtttgagaatttgccattgcatctcagtcttttttatttatatgttttttctttttttgagatggagtcttgccctgttgccctggctggagtgcaatggcgcgatctcggctcactgcagcctccgccttccgggttcaagtgatgctcctgcctcagcctgcctcccaagtagctgggattataggcgcatgccaccatgcccggctaattttttgtatttttagtagagatggggtttcactatgttggccaggcatctcaatcgttttactaagaaatttggaggccttgagaaatgggtaaacttgaaacatttaaaaaagttgttctgctaattatcctaccacgtgtgtcagagacaacattaccctcttattacttaaaagtaatttggactggttcgcacacacaaaaatagctttattaacaacttgagtaatttatcaagttcagattctttttttcctccagaaatgctgcttttggtacactgagaggtcattcatttaaagtttgtccttggcaattccttattgaatagattccattttattttatttacattttgtacaaagctgataaataactgaaaccaaattagctcaaactggttatatttctgggtacaaaccaggtgtatagttaatccattgttgtttctgtgtcraccaccattgtcctcacctatacttgggcagtgggggtggggaggagaacataaaaacccaccaagcctcatttttcttgctaatttatttccttgaacttggtgagattctatctgcagtgtttccaaaaatagttttggaaattgcaaaaatactacaatgctgttgtgccggccacactgtgagtgctgactgtcatgcattttatagcccatstccctctccagtgaggcttttggccactggccgttaattggtaaggttcttgaaaactgaagtgatggtatcagcatggatgcccgtgctttctgatgccactgaagatggatagaagcttcaagttatgctttgtgcagactgaatttttccaatttgtgcttagtagcatcttattatattagaccagcactgactggtgatgaatagcaagattgctcccttctaagggcttggcaaaccaagaagaatgcagtgacatatgtcttatgtcttcaaaagcaactggacacttgaagagtattttctagtctcattttgtaaacccaattacgagcggagctacaatttttatctttgtttaatgtaaccaatgaggccattgtcactgtatggagaatagctttagtccatattctctgttttttaagactctcagtctccttgcaggtgcctttggagagttaggtgtttgctgtgatttgagggatagtggccaataattttattgaaatgaatattggttaattaaagcttattgtatgccatgggccattctaagaacttccatccacccaaaagcactatgaaatagatgttgttatttcactgatggaaaaacaagcacagagaggctaaggaatatgctgaagcttgcacagctagtaaatggcagaacattcagactggaattcagacttatacactcacattcataccacacagcctctcgaagggacgtgccccttgaacgcaagagaggtacattgggtggccatggtgctcacagtctctcaatcctttatgttgagggagaaatgataaccagatctcattttgtgtgccaacccgaaagcctgacttgactgcctmaaatgttargaaggactctaaagccctatctggattccaaatttatggttggtgcagactggatttttacaatttgtgcttagtagtatcttattatattagcccggcactgactggtgatgaattacaagattactcccgtctaagggcttggcaaaccaagaagaatgcagttccacgatccacttggaatgtgtgcagtgagtgtgggaggactggtataagtagcaaagcacttggcactctgggtgtaaagcattcagatctcttgcaaaatgcaaattttacctgcggggatacccattcaacaattagaagctgctgatttctggacgagagttagtttatttagaaagtaacactcagagacactgggacagagaacagatccattttaaggctgtgtgagcactgatccatgacagtattggttcaggggcaaagaatgggaggaaagaaaaagacaagttatagctgcactgaaaacaaactgggcatgtcctaattttgctcagggctacttctcttagagtcgttaaggttttgagcatattaacagcaatactgatcatagctaatatgcctctatgtcaggctctgtactgggttctttgagtatactcaccacctcctgacaaggttttggcagccttacttggtagacactatgattcccattacatacatggaatgtacagtaactgaggatcactgtgatattgggaaagtgggacttcagacgctagcctccccttgtagtgcctgcattcttttcacagcccctccccaccttagaatcattttcttcaagggagagtatggtttgtgatgcccttatcagcaaaacttcagctagaagatgcaagggtgaaatacacctccccaccccacgtgatctcatagcacagaatgactggccaccccagactgaaggttagggagactgggggccccagactcaaggttggggagactggggagagggaaagcgaggaagaagcgtaagtgtatcttacagtttaaaaccataatgggacatatcattttcttagttctccatttattaataaaatgcccaataccttctggcatgtgctttgaactgcttttaattatcttcagttggatggagaaaaggtaatggggacctcataatagtcgtggagggacaactgggatttatttccatagggaaggcagagactgtttgccagggaaccaaggcctttcaaagttgaggacacttcccggtgccgtgcggtgtaaatcacagtgcaaactatgcgattatcccctgcagaggaatcgastgtgactttatgggattcttcaccaagcacttaggaataatctgatataaaacagcaggggtggagagtaatgacaacttcaaattagtttaatgaatgtttacatttaaaaaaaaaaggcttttctgcaaacctgaaaataagaagtgacagcttcctttcctatttcccttgcaagaggtacctcctggttttcagcctgaggaggaaggtggctttatttaactccttcagccccggaacatcacagggcccttctttgtgcattctgggttctaacagccmcttgaacagtgcttgagagtatttccattataaatgtcgaatcggcattgaaggaacatctgttttaagtcaacttagactcaatccaggaaaaaaaataaatttctggctgtccacctgctcaaaaggtcaattacccacccaaatcagccagagatggctgatgggctacagatgccgaggatatttttagcaggattttggcaggtaccctgcttgttgaatgcagcaaagaagagggaggttgataaaccattatactgtttgaaagttggtgccgcgccaaatctcccaccaaatctggatggtgcttttgagctatttccccacttctgctgaagaaggattcatttcagtagaaggagtgggataggaaatgttcacattgcttgcagtatgtgaaatagacctcgaggtattttggataaaaaagcaacattcgtgttttakatatggttacccagcccaagccgcctctgctctttatagccgtgtttttgaagtgttcttattttttgttccgaaatcggaatatttcctgscgtgcgtatcttggccccatcacatcacaacaggctgaatgctgtccacaggttgccagtctggatatggaatattagtcaaaacgatataaactaacttggtctctgctataggagggacaaaataactacaaaacaaaagcaagaaataaaacaaaaccaaacaaaagcctgcagtgtttgggcccctttcagggatatctggaaaaccaaatggagaattccaggagcggatttggaaacaaggttgggtctactttggcctttaagccatcactagaaacactgactcttgcgcgctagagtgatgtttttccttctcttttggattgacgtgccagcacctcaagaaacctctgtgaaaaatccacaggtcttcaagaaccagaagaaaacagaataaaaatagctcaaaataaaaatgaaaatgaaaatagagcaaacatccatttctgtgggacctaaagagttgggaaacctaaacaaccagatgatgatagctgttgctgctcttcctgaaatcaattttaaagtaggaattgtcaaagataatgagactagtatggagcaaaaactggcaattttcagttaaccagaatgttgcatgaattagaaccccagattttcctggagatgactctagccaggccatttgaggacaagttgccaaatatttgtattttagaagcctcagaagtgtgcacaattttctagttctcaacaaggcactacagcaacatgtctagtgtttatgtaaatgatctttataaatcctctagctgatagagagttttcttccatcacaggcaaaatgtgggtttagatgcaatttgtaatattgttgtacaagagtggggtcctttcactgacatatacgaagtgttgtaatacaaggcaaagaaaatacaaacccatccttagtcatttagaaagacaacctggttgagaatttaagatgatggtttagggcatagcttgtggaattcgatgggttgcactgtaagtttcagtttccttatctgtaaaagtaggaataatatctagacctaaaggttattttgaagattaaatgagataatgcgtgaaaagtgctgactcagcacctgcagaacccatgcgtcgtcatcatcacgtttgttgagggatttgaggcgtgtctaggaacgcagatgtggagacacctggagcatcttcaggagctgtttctgcggattctcatgtggcttatcaagcacaggaaatagttttcctggaaagacatggagcaaagcagttatttagccgtccatccggcactgccaacctcttcgtgttcctgcaaggattaaatgagagatggtgacagtagagagtcagccctgagggaggagtgtacaattcatgggctactattccatgtgtgtgggtcaggagacgcttaaggcattcacagcactgggtgtgaggaaggatgcaaataagcttaacttatttatgaattatctgccctggaatggcattctaatgttgtgttggaagagagacaagaatgtgctgggaggatactcagtttataacggacgttctgatggccagtgcaaatggcgccaggaatctgtgtttatagagatggagcatggatgcccctgagcacctgtgtgtgtgcgaagggtgaatgggttgctgggagttcgtcggttgtttagggaagcacttacgtgtatgcctgtgtgtgtctctaggactcactctccacttcccaccttacttattattagtgttcttgtttctcttcgctatggggaaatgcagataaaccgtaaaaacttgatagagtgaacaaaggcttcggaagcttccttagttcttataattgctcaatgggttcttcttgcctgctgcacaggtaaaacccagttcactgagatgacattatggcaggaaagaaagagtttaattaacacaagtccagccaagcaaaaggacaggagtttattattacccaaatcagcctccccgaaaatttggaggctagtgttcttccaggatagtttagcaggaagggagctagggaatggaaaatgctgattggttggggatgaaatcattgaagtgtggaaaatggtcctcgtgcactgggtcagcctcagttccagttgaatcacaagtcccaggcctaggtggggtcagtgggtcatcaaaatgcaaaagtctgaaaaccattccaaaaaaaccagtcttaggttctacaatagtgatgttatctacaggaataattggggaagttccaaatcttgtgacctcctatgcctacatcttagctgaattcagacccctctcctaatcctaaccttgtggccttttaggagctttacaaaggtggtttcatttcgggaaaggctgttatcattcttgctttaagattaaagtataaactaaattcttcccagtgttactttgccctatgcccagggatgagtgaggactgccagcccgtggggctagaagcaagatggagtcagctatgctgtcatattcctcttatggtcacaatttcacaaaggtggcttcattctcatgaccattgctcccaggcattgttcttgaataccttagaaagtttcattagctcatgtctctcctctttgtaccaccttccaacatttccctactgccttggacattaaagtccaaatccagtctgttcatcatgatctgtggagcctttgataatcgcagcctccagcttctccttcacacctgtctcctgtctcctgctttttctttttgtgcactgcccaagaaccttttcatctactaatctttgagtttgccgtcctctcttcctaaatcactcccctccctccactgttccacgtgggacgttccttccagagaggcctcccttaagcccaccttccatacctcctctggttatcctcagtcatgaggccctgcttcctcccgcacactgagcacaggcagtacctgctttactcatgtacttgtttattatctgtgtcacccagtgggacatagtagactccatcagggctgggaaggaatctgccttcgtcaccattttgacatcattatcaagtgcgcaattaggctcacagttgagctcaacataggatctgtggaaggaaagaaggacagaaggaaggaagggggaagggaagaagggaggaagggagggaaggaaggagggaataatttccaggaagcctcattggatttctttcccccttatttctgaaagctcacctctttacagctggcaaggccagcagaactgaacaatagagccggattaagcaagcattcaggtgcccacttaattcaatcggcgaatttgcatttctcaggctctgtgccatgagagcctgccgcctcaagggaccacctgccttctaccagaaggactttgctccttggagaatttccctctggcaatggtccaggtcaaacgaggtaccatacaaatgtggcttgtcaccattttccagtttaactttctcaagccttggctgcctcgatttcattccagactacagtagcagctgaaaaggtagctaccattgcagtcgaagacactggcagatgggactggcttgttggcagagatggcagagatggcagagatatgaactatctctgaaagggcattctgcatgccacagttaagtgctctgttgaaggacggctctggaagggagcatccgcgaaatgaataagaaggtggttattagtgaggtctccctgaaaggagcatagctggatgcaatccttggaggccctgtctagggcctgtctggggctccagctttcatagggccggccatcccctttgctctgggtgagatctgtctttgcttctggtgattctgatattcactatcgagaacgattgctttaaaacacatcagatcaaagttttctaaaatcagagtaaaagctaaaacctttgcaaggtcctgcatgacttgagtccctgttcctcccttgacatcaaaatggctgttgtctgctctcgctctctctctttctctctctctgcttcagctgtcctgacctccttgacctttcttaaaaactttatgaaaactccacgtttgggcttccctccacctgagatgctcttctcggctcctgtgagggctacccctttaccctttatagtgtctgcccggacatctcctcactagagaccttccctgaccactgccacatggaatagtactaatacttcatgctcatcctctgcctgccctgggtttttaatttgtgcgtgtgggtggggtggggggcgggggggggcacttatcaccacctgcatattatgcttttgtgcatttcaggttggtctttcccgcaagaaggtaaactcatctgcagctgtattcgctgtgcctatggtagtgcctggcaaatgcacagaagtgggtattastgaggactttgtggttcgaatggaatgagtgtgctgctgacagtgttgcgagtcatctgcaaatgaaaagtccttccttctcttcccttctggaaccttccaaagaggctagcctcctgagagggcgtctcctgggaatgcctgtgatccaggcaaggcacctaaatcagccaataaataattagttttgagaaaaaagcctgcacaaaagcagaactcacagattttctcattgatcttcctgcctttgccttggccatggtcagtctttggggctattagctgcatgtacaagtgcacaggggatgggaggggggctccggaagatccctaacccattgtggacacaccatttatgttagtggaatctggtaagagtgattgaggagagagcattgggtgaatgaccctgtaatccttataaaaatagtagcaacggtaactaatgatgtttatgaactgcctaagaatgccatgactgtgtcaagcacttcccataactagctcatgtaaagcctgtaaccatcttgggggtgaggacaattatgtcccattgtgttatgtgtctgtgtttgcaggagttgttcagtggtaaggtgcagtcaggacttaaacccgtgttcctgagagtagctctgtgctgcctgacacactccttcctcctgaatgcacaatcatatgttcacgtgccacatggttttcagaaagcactgcacgtgtaggaagctcaagacagagacgtggctggtcacggtggctcatgcctgtaatctcaacgctttgggaggctgaagcaggaggatcacttgagcctrggagttcgagacctgggcaacatggtgagacccccatctctacaaacaacaacaacaamaaaaaaaattagccaggcgtgggggtgcatgcctgtgctcccagccactcaggaggctgaggtgggaggatggctcgagcccaggaggccaaggctgcagtgagatatgacctcaccactgccctgcagcctgagctatagagccagaacttgtctcaaaaaaacccaataataataataataataataataataataataataataataataataaagaaagcgagagaggaggtagggaatgaatgccgaaagtggttccttgggtctgatgcccacgcttaaccgattcccagccaaacatttcacagttgtcttacgcacaggcgtaagatatgcatctatcttggtgtgcacctgagaagtagttatgtctaagtttccgacttgacttggtagagtcatttgatcagtaaagcgcagagcagatgaactacctggaaagaaagtgccggaactccccacgtgtgacatctcacttcggggaaaggtgggccctgcgctgcgcttggcgaaggtaaatgcacctgggtatcctcttgacctggaatggtggaaaataaagaaaacttcagcatgtagcaagtagttgtgagtacgattaatgctgtttagagttgccagttctcttacgcactcagcgaaggccgtgtggcttcgcattaatcaccaccaagccaacatgagcttccagcaaaagagcccagtgattgggaacaaattcaaaacagctttatttcattgacagacaggacctttttgttaaactgtggtttaaagacctttacatctctgtcttgttcacacgttactgtagtcatttacgtaaacttaggaactaagaaccgacttatttatcacaacctattggcaggaaaagggtcacataaaaaagaatctttattggtaggtttttttttttttttaaagctaataaacagtgctagtggaaagtatgctgttatcaaccattattgaagtaagtgggtttctggactgaaaaaaaataaagaaaacatctaaatgtcagtgtgcaaatagaaagtagcagtcaattaaatgaggcagtgtgtggtcaccatagatggccaatgtctgtgttattagggaaagaagagaagccgggaaggaggaggaggtttctggggttaacctgtgttttgctaactggtgttagttagtctcagataagagctctatgtaaaccaactttggcccaaattgactcattgaaaaacaccttgtttcaaattttttccccctctatgaccaaaaagttacccaaacctttgtgtcacatatttaaggatgttcaaggcaaccaattagtattcaagcatttagaattattttgaaacatcttctgtgaaaaacaatttatttcctattccwaaataaatgcagaatattcctaatatagtttgatagttcctcctcaagacttatcattcaaagattgggcaaattgacttgaaagagaaaagttaagctatttccctaataccaaggcaatgcaggtcagctgcagtgcctaatgtttataaaacttgtaaatgttgaaacccacacttggtctgagagaacatcatgctccagtttgttcttaggaatgtgtttctgatgtgtgtgtgtgtgtgtgtgtgtgtgtgtgtgtgtgtgtgttttccagaaaccaactgggaagggccctaagctgagattactgttgagaagtaaattgtgcttttaaagtgtcctccagcaaaatggtctcctggctgtctttggaaatgacgtatcagtccagatgccctttttcttgatggattgctaggatttttactcaccaccgatggaaaattctcatagtctggaagggtggagcgtctgccttctatcatgattgtacacagatgagcaaagctccttggcaatgagtgaggcagacgggcagtcaggttcggactggtgcagcaggtaggctgctgctagggaggaaggaagaggcacagaagttcagggcgtgagagggtatgcgagagatgtcaacaatccaggagctggcttgcttcttcctttagtcagtggtgcaagcttcaagtggataattcaaatgaatcaatggaaaggcctcttttaacatttgatttgtttcttcaaagaacacagatgaagtttttctcatctctttagattagtgattctatattggtgagggagtggaagagaaatgtgggtgtgttgactatattctccacagaaactttttgaagtagcatcstcactcagcacagaacattttgacaatacacttccagggcaggtggtttcttactatgtccctccctacccccacatactttgggactcagaatgtagggagtgtactctcgagggatgcrgcccatacgtgaatgcatggaggcagcatataaggttgcaaagcactgaccttctctttttatgattcccatttattccatagactgtgaagtctgcctgtacatttccaggctagcagtttttaatcaaatgtatgatcactttcttctgatgaacacagttaaggggctttgttgttcaggtgagtctcacattgtactcctctcctaagagcatttattattacttgctacatacatttttgacaacctgacaatgacttttttgtcttaatttggagaaaacatactctgagcttttgaagttggtgtacttgttaaaggaagccagaaaagcttttcaaccatttgagagggtgtgaaatacagaaggggttgtgcgtttcttcccccctcatctcttagagccctgttacccaagagagttcaccaattacccaaaccaagtttcattttgttttctctctagtttgaaaactgtttttattgcttcaactctccttgtctaggagagctgtttcaggtttttagagtcctaagaaaggcttcactggctctctgccagcctcctgtcccattacacgctcaggcttgtagtcagttactctctgctggttttgctaaaccactcttgggtctttcttggcctcctgccccgcattccccttcacgttgtaaacgtagctttttaagttggtcccttgattgcttcaagtaattgatctgttggcctaaaaatgagtggctctgattcagaggtaggagttaaaccagattctgcctagggacaagtgtgttgggagctctgcttctctggagacaatggtcagcagtgttgcaaccaactccatgtctggtgcaccagatggtctcattgggtggtagggtggccaaaccttgtgtgagctggctcacttgttcattcattcattcgtttactcgttcttttttgtattagcttaaaaatgcttatacgccggccatggtggctcatgcctgtaatcctagcactttggaaggcagaggcgggaggattgcttgagtctaggagtttgagaccagcttggccaaaacagtgagactccatctctacaaaaaaagaaaaataaattagttaggcatggtagagtgtgcctgtagtcctagctactcaggaagctgagatgggaggattgcttgagcctagggggttgaggctgcagtgagctatgatcataccactgcaatctagcctgagtaacagaatgagactgtccccccaaccccccaaaaacagaaaacagtattcctatcatatgcattctcaactctgcagaggtcctgggtcacatttcctgcaaagttgcactgcctcccataggcatgagacctccacatggacagaatttcatgagtgttcaccttggtgttgctactttgcaacatagacttgaagattcagagaggagatgtggtaagagtttatttctggacagagaaaagctacaccattcatctagatctcattaatctgtattcattttgacatgcttttctgcagttgacgtttttatttattaagcgctttacaagatattcagtatcattatcgaagctataattattaatgatcaaagttagcagtacttgttttagctgtcatcttcatcatcaccatcaccatcaccatcgtcatcatcagggccacaacagcctcttcttttctcttaaatcttccagcaattcttcaactttgcctgtatatttatcatacaacataatcctagtatttagtaaatgcttrgtctttgatttcttattttcaaatgcatgtctttagaaccagaatgtgtgtagctgttttctggcctgaatttgggctgagatgatgagaagtttagttgccactttcagctwagtggaagtgttttccccatttggactccgggtcattgacaaacgtcatcactgtttttagttgaaatgtgcttccatgtggctgttcatcagcacacccatatctagacgtgtgctagcctcagtgagagttgcagaatctgtgtattcatttcctttatctagaaatcctcattatggtacataaaagagctttctatcgcttttttacattatagtagttattcgttattattattattattattattattattattattattattatttctgagacaccgttttactctctctttgcccaggctggagtgaaatggcacgatcgcagctcactgcgacctccacctcttgggttcaagtggttcttctgcctcagcttcctgagtagctgggattacaggtgcacgccgccatgcccggctactttttgtatttttagtggagacagggtttcaccatgttggccaggctggtctcaaactcctgacctcaggtgatccacccaactcggcctcccaaagtgctggggtttcaagcatgagccaccgcgcctggctttgttattatagagttatatggatttatcattttaggtggagatttgagtttatgtctcctacagacagccgtagactttgtttcattttaagatcagtgttgcagacgctgctgagtgtctccaaatgtctgttctccctttattacctactaataaaatacctaattttcaacagcctgggaagagactatatttccctgcttgcctttgcagctagagtgatcctttgatgaagttctagtaaatgggacgttagcagaactgtcgtatctcagggcttccgtagggtttataactgatccactgagagataagttgagagcttgagagtcaacctttagaaaagttcgtaactatttgtcaaaattaagcttatgtctgttccaggtagtaattttaaaatgggcttatattttgtatgtcctttttaatttcctttttctagcaattctcaatgtttttttaaaatctcttctggaggagggtacccttcacaaagttatttgccaaaggtctgagaaaaaaaaaagcctttcaccatggttagttcgagaagcacagcaatacagtacttctgctacgagtgtatacaggctgaggatgggtgctttgtggcccttttcttttaccggctgactagaatgttgacgttaaagcagttagagtycgagcaggcaactccgaccccaagttggagctgtgtgttgaagatagaagagcaaatatgtrgaaggaacctggatttctatttttttwaaaaatataataaatcatccagccccaaatgtcaggaacctgggtttctaatgatggttggctgtcacccccatttcccacactttaaatgagagaagtaaacatctgacttcctaaaaccaccgttctcactcaaagccgaatctcatcctgactgaaatgtcactagtccttttttttttttttttttttttttttttttttggtcatattttctccatttggagaggctggctgacccatcaatgggcagtgtgggggaatggagagacctgggattttggggacaacagtgaccatgaggggatctctacactcctacttggaaatggagtagcattctacacttaagtatctccctttataagctaggaatactaagaacctaagagtctccatgaggattagatgaggtaatgtttgtaaagaatctgagatatagtaagttgatcagcawatgttatttatcctcttcttccctctacaaagataactaagctgagatagcctaactcccccagctcagaaaatagcaagttatttgcaaaatcaaatgctgatgtaaccatttccattctgaactcagaaaatggagataaatctcttgcaaggcttttgattttagtttttagatacagaacctttaaaaaaaaagaaaaataaacgttttgccamagtgtagtatatacaacagatgtgagggaaggacattgttttaagtgggaaacgtcagctctctcaacttctacacattcgactattccctactcctcagtgaccccaaagaccccagagaaactcagtatgaaaaatcactatggaagtgcaatagttattactttgtttggaattcactacaacactgtttctcaaaatataattcctgagtcacttggaagattacaaccaactgaattagaatctctggaaggcatcctaagagtctgcatttgtatgaagcttcccaggtggttctgctcagccctaagtttgaaaactactggcagaatagtagcagagttacttattctacattcgttttttaacccattgtaaaaatcatacatgtatgttcaagacaccggcagatcacaggaagggaaaaaaaatcacttatgcttccaccaccttaacctagaaacctttaggacttttcagtacttcctttctgtctttttcccctatacctaagtttttatttacaatatagttgtagccatatgattgttgctttcattgttgcttacatgtgttaaataattttgtctctgtataataacaacctctggcgatttttcctttctctctctctcttttttttttcttttstttagacggagtcttgctctgtcacccaggctggagtttagtggcatgatcttggctcactgcaccctccgccttctgggatcaagtgattctcctgccttagcctcctgagtagctgggactataggtgtacatcaccacacctggctactttttgtatttttagtagagatggggtctcatctggtgatttttcaagtaaggtaatggaagcaagagaggtttacatacatggtgtacatatacctcggcagcctgtttccttcccttataactatctcaaaaaamcatattaagttatttttcagaattatgttttttcctgttgcttttgactgtaaagggcagacttaaatttagttaacatctgctctaaygttggatcatgtgtggagtccccagttttcaacattaaaaataaagtatttgttgaagtggggtttttttcttcttacagtatatgtagaaccattttcttgaaaatgtttcttagaaatttgttacttagaagatttgagccaatgatacattgccgagatttgtaagagtaagaccagcctacgctgagtattattttctcaaaggaatattatgaggcacatcccatcttcatatcagggaacaaactgtcacattttagtgaaatctgtgggttatgtgtgaccacacacagtgtcgtgtttgctccctttacagaaatctaagtaaaagaatcactttttcctagtatctggatgacttgatttcttactatcttgggccttcttggaaaccctgaaatgtagccttttcatcttaattcacaaagtgttcattctcacccttttccttcatgagaattttctgaagctattgtgaatctatggaagactcaaggtagtatctttttcacagcattcaaaaaaatgctgctggctccttgrcttgtccggtgcatcctccgtgccagcccccgctgtcctagaaccatctaagctaactctccgatgagctctggcctctggacctcagcctatccaggccccttcatgacccagtcacagtgattctatctgtacctaccacagctaggtaggcggtatgggaagaccacaaacttgagagtcagacggatcgaacttcgtctttagycccccacttaggtgttatgtgactgtggtcgggttattggtaacatcttcttgctcagcttcctgacctgcagaatgggaataagaatacctagcacatagggttataatgragatgaaactgcttaacgcatgtgaataacaacaatggctaacatgtatcagacgcttgtcttagtgtttattgttttatgcgtattgtcctgtttcatcctcatgcttaccctgagagaaaggtggtattattattcttattttgcaggtgaggcttaaagaggtcaattattaggttgaactgtatgaaatgactgtttttatagggaaaaacagtagccgatcatcaattccctaaggttccacgtaataatttgtccaggtctcatagcaaaaaggtggccggatgaggatttgaacccactgctctccaacccctaagcccgtgctttgtagaattaatcggagctctaaagtacttgaccctgggcctgacaccaatcaggagcttaaaacccattagtttcttttttgttttatttttgcccactattaaaatgtgccaaagtaataagatcaaacagggcccctgcgttttgacaaacatccgaattctgaatttcagcgtggaacagggcatggaaagcaaacacaatggggaaaattgccgtggccggtcccgacaatgtgtggattaaaaaaccacacgcatgcacagagacctgatgtgaatggtatttctgagtggaagctaagtaggagctgaaaatggccttttaaaatacagaacataaggatgcaattcacagagatggtctaaactgtaaacatgcagctgtggggtttgtgaggctcattgcttacataccgacagcatacaaattgtcaagtacttaaagttccattgttgctgaaagggcctccacccaatgtccttaaatggtcccccytttttttttttttttcaaaccacaggatttacatctctcgtagcatctaatgaaataccagcaagaattgtgtgttggtgtaagaaataataatctttccaaatccttttgttttgttatcatttgctaatagagatctttgaaagaaaattcaaagattgaagtttgtattctcctaaactcctgcaaagaagtcctgtgcaaggatcgttcactagtgttctgcatcgttcttcttactcaactctcccgagaggcattgtggacgcctgtggggttggtttttggcacccatccctgaccccttcttctccaggaaactctgttcctacctgctcctcttgtggctaccttgggaggtgccatttttatcaaggttagtgtgtggttaagcaccttgccacaagctcaggggaaaaaaaggtcccctccccagattttttttagaactggaagtttccatttcctggcactgctgaaagctctaggacataaaacttgggagccgatggccttcaggctgcccataatgtgaagagaggtcatttcagacattcagataaagtctgtggctccagtatttttctaggtcttgctccctccctgaccttttcacagtttggtgacacaactcttccttgaattccataggttgacaaattcccctgagtttgggttagggttttgttacttgcaaggcaggcatcacagggctgctcctggccatgcatagctttggaatcacttctctgattctcatggctcgggaaggagaaagtgtcctgtgtgtggagatggcagggtggctggagttgagaggagagtcccttgaatgccacgcaacatttctctctgtaggtgtcctctgcacactgtccaaactccatttttaaccttgactgcatagtaccatgtacattcattaagcatccctcgccataggagaatctgagttcctgggagcatttaacacagttcctggccttgagtaaaaacttcataagcacttgttgaattgaactgaatttgttgtctgtgtttaaaggacttgatggataaagggagatttaacagtttatagccagattggactcaaccatgatgatttctggtccatcttttagaatggcttcacttctcttggcctttatttctccaagtggtgataatgagacctatccctaacggttaaagtgacatggtccatttaaagtgcttaaaccaattgccaggcacataataggtgctcaataaatacttcctttatttccctgttaggcctctcccaaccagagatcaaagatgattggccctgaagttatttttccccccaaatttgatagaaatcagtagagatgctaaaatataatacatttgacctgcattgatcaaggtaggctaactgctataacaactttacaattagtgccttaacataatataaaatgacttcttgttcatgtaacatccaaggtagctgtacctagttgcaatgctctcttccaagtagatatttagggacacgggctccttctatcttctgtcaccaccacctttatttttagcatccgcggtcttagcaacagtagaaggaaagaatggagataagacagtgggtatttaatcaccttagcccataagtgactcacgtcacttctgactaccatatccaatttttgcctctctttttttcttgggttccccccgacaaaaaaaaatatgacagaagtatcacccatccagccagccagccatcaatccggtatccattcatccatccatccatctaggcatcccaggtgactcattcctgtgaccttgggagacagtctttcttcctagaggttgtttgccccaaccccctgttacattcttgaaccatatgtttcccattgtttgcacttcccctagtcacctggtgctttaatttttgcctgtaaccttctgaaactttccttaaatgttcggctttgacctgtcattcactaagtctttcaccatccttcactcatcttacctccttcttctgtggcatttcataaatttaatgattgtaattgtgattacaacataattgtttgtgtctaccccaggctttgcaacagggaactatatcattattttgcagacacaacaaattctgcaagcatgtatctttggaataaaggagagagggttggacacaaatgtgattacaacatatgcttctctgggcatagctttgccccattgcacgaatatagaaaatttggcaggctgaaaataagcggaaagatcctcaagctgttccttccaccccctgggatgctgattaagttaagatttcagattttatttattctacgggtatttgttgaatatttatttcttamgatrccacgcactgctttaggcactgggaatatagcaggatatacaaaacagaaaaatcatggccctcatggattattggttgtgagtaataggaacctttcaatctaacttaggaaaaaasgttagggagccaaggaggaagagtgggtgtgatgatgcatcaggataccagagaatcccgtggaatcccacagtgacacagccaagccttgggaggggtgacactagcgatagagacagaaacccacacaggagtccttttctctgtctctcatctctgcttttctytgtacatctggttcaattattctcttgccacgaatcagctatttgtattcctctgtgcacgtcgcagaagatcaggaatttgcacattatagtcacaaccatacctagaaccaaattgcctaacactgaatcccaaatccaaattcctgggagatagaattcaattcttctcttgccacamatcagctgtttatactcctctttgcacgttgcagaagatcaggaatttgcacattatagccacaaccatacccagaaccagattgtctaacactgaatctcgaatccamattcctggatttggatggactcaatctggacccagtatctacatttggtccagtcatctgtatccggcatcggggtcttgttgaaaaaccatggcttagccgggtacagtggctcatacctgtaatcccagccacttgggaggctgaagtgggaggatcgcttgaagccaggagtttgagaccagcccgggcaacacagggaggcaacatctctaaaagaattttttaaggaataaaaaggaaaagcatggcttttattctaagagcaaaggcattttgtatatttggcaggtatcccaacagatgcatcacccagtctcttaaattaagataataatttatttggcaagtgaattcttctagtgtagttagatagtgatgaaaagatttttatacctccaaacacacacacgcacatgcacacccaccaggctcttctttacttctcactcatagatttgaaaacaactattatattatagaagttttttggtatagctgccaggggtcattgtttccatcccctgtgtggagataagaaaatcgagatccagtggagtgtggggtgctgagagaacaagtctatgttttcttgagacaaagtcttgatctgttgcccaggctcgagtgcagtggcagcatcttgrctcactgcaacttctgcctcccrtgttcaagtgattctcctgtctcagcctcctagggagctgggattacaggtgtgcaccactatgcccagctaatttttatattttcagtagagatggggttttgccgtgttggccaggctggtcttgaattcttgacctcaggtgatccatccactttggcctcccaaagcgctgggattacaggcatgagcctaactatcctcattaagccatctgctttctgcagtcattttcatggcgatgtgttataacaggacagaccttgtactttggaatcaaacattctcaactctgctatctgctctttgtggggccctgaacaaaaatmtttactctctttgagccttcgcttcctcattggtcaagacttttctcactgcattatatttgagtgagacccgtatcaatggattgaaattctcagaaacccaagaccaggaatagcccagtgacaggaatttagaccatgccaagtgtgaaccatggcttgcgggggctcctgtctcacgctggatgctcctgcctggctgcctctggtctccagcagaagacctgtcgtgcttgagtgacaaagcagattgcttcctcccacctctgtgggttaggacccctttttctatcctagtttcactctgatgggcgagttcactcacagtgaaaccgtagcaaaacctcaaggtttggcttaactgcaaaggggtggttgatatcagattcatacgccagaaccagaagaccactcgtgagaaattctgtaagcacaggagtgtggtttrtgtcaaaatcaatctgatggagtgaagccattccttgccaagcgaaaatacagcatcatcaactacatccttgagcctagaacctcttcactcagcaccagctagtgggtaaagcccgggagaggttgtaacaaatctgattccctgacactcacctgaaacaagattcagcaaaattaaaagcaatattaatatatgtcgccttgggaaacagaggcagaggagaacaggaaagagtcagatggactttgatttgagacccgtttctgcttcttcccagggtgtgacctcagyggagttccagagcatccatctcctttgtaagacacagataataccaactgcatggatttgttatgasagttacatcaggggagggtcatgaggtcaccttcccatggccaggagaagcaggtactcaggaatggctacttctctggccactttatagacctatggagatgttgaaagtagcccaaaggaactgtgtgcctcgcatcttggtccatcttcatgggttgatcattgtggttcatatcactgtttcatgaaacacagcccgccagaaagtcccgagtgttttgatttcatcctatacctatagttacaggccatttaagatccacagtctgctcttttagcttctgccagcacatttggacatctgtgcagttcccagggcaggtgaagagttgttcatgtgatgcaaacttttgagaagggacgtgtagggaagatgggagggaggtgatatttattgagtattttctttttgctttcagctttataccttgtgtgtgcttacagaggtcatgaattgtccgctgttgtatgtgtaatccgtggcagatgtgcataataagttcaggaggggctcggttttgggaggccggggatactagaagataaccctaaaatgtggaaatctacatcagagagtggtgtgartggttcccaaaatgcctacctggcactcctaccaaagacacagcagagaacttggggcctcttgtttcagccattttcatcttcactgtaaatctagacaagataatgaatgaagaacctgacacatttaaggaactccatagttgggagcccagtgtgagtcattatggcgagtccctaacactgcggttcccctacttgagggcgcaggtaggggcactttgctgcctcctttgacaataagcattgccattgccatgtgatttgctttgcctaatgaaatgtgagtgacacttccagatggaaatattaagagccagtgtgtggttcaccctgaccccttcctatgccccagcaattaaggaagcaatgttcagatgaaacccatgtcttcctcctgggtccctgagtgaccacagtcaacagagcttccctgttggccattactaatgtcaagaacaaagctgtgtaaagtcactaagattttggaggtatcggctgttgcagtagaacctagcctatctcacctgacacaaacgttttctttctcacaaaacctcacaccagtgttgttttattcatctgcttatgcacgcgtatggctgcaacatccttccaaaatgcattacaggctctaatgcacgataagacagttaggttcgaaggaaaacaaagacaattgcacggcacagagggaatatactgctacggtaaaccgatcactaacayccggccctgaatttgcttcaaagttttcactaaggcacaaagggagccgtgtggagctccggagttcccatctgaggtcttgtctaactccttggcaacttttatgtatttgtataggagactcttttgccagatggttgaaatgttcatcctcctattttgttttaatgcaaactgacatttcttcatcttcctgcggtgggtttcttttatgaggtcgtgctttgcattttcatagaaagaatttctgactcccgatcggagcccacccttgtagtttctgtgggggctgttttggttaaccactcgcatcagttttaagtctccacaggcagaaccagaccatcgtgaacttcttgatttacatggtggtggagagtggctgagaaaccagggagaaacaggaaggagctgattgaggagaccaaaggagggtggggccgcagctctcaggcactcttggtgttcagaaggccagcttgaagaaagatgtgcatatttgcaaatgcatttcttgttcctagtgaagaggtgaggaaggacactgactgtgctagagctgtacaaagagaagtagaactctaaatagagaaaatatgtaaagatcaataaatcacaccaaaaataagtcataagaacaacaaataataccaggaataaataatgtaaaatataaataattcctaaaatggtgataacagcttatgacaagtaatttcttttttttgagatggagtctcgctctgttgcccagggtagagtgcagtggtacagtctcggctcactgcaacctctgcaacccaggttcagtcgattctcctgcctcctgagtagctgggactacaggtgcatgccaccacgcccggctactttttgtattttcagtaaagatggggtttcaccatattggtcagactggtcttggactcctggcctcgtgatgcacccgcatcggcctcccaaagtgctgggattacaggcatgagccaccgcacctggaggacaagtaatttctaagtattatttcttttaatcctcrcagtgactccttgttagggwttgctgcattttatacaaagaagaaaggagtctgtggaagtgacataaagtaggacatgtattcatttactgattcaacctttcatttgtacatatatgtatattttacagacacggtcaccctgtctaggtattaacagttattacaaagatgatataattttgcaatcaaaatacagacacagttgtctgtctcccaggctggagtgcagtggcacaattatagctcaccacagccttgaactactaggcttaagcaatcctcccgcctcagcctcccaaagtgctgggattacaggcatgagtcgccacactcaattatacacttaaatatacatatatatatacaatatacatatgtaaatatatctgcatatacatgtttagggacaaaaacacgggagtaccatttctgtctttgtctctctctctctttctctcacttgactctgttgggagctatattagttgttttctctttccaaaccaccttctggaggtctcttagattttcccaatgatgaaggagctactgtctaggttattacagtagtaatagtggccaagaaaatgatatgaggttgaagtggacagatgatgcttttcactcttctgggaggttcccactgggtggtctgctttgctgagctttgaaaaagagcttttcttcttcccagttcactgggccgatgtgggcacagcctcaggttttggtttttttctcctttgctccttcaccacctagaaaactaatttcctataaagaaaatttctctggaaatgcaactttctcaataggttgagtctactcaaagactgacaggtaaaagtggtccacatagaaaaacctgtttctctattttgttttcaaaattatatcatctttataataactgttagtacctagaaaaatgcatacattttattccttaccaaaaccagttaccctatagtcaaaaggcattcagaagtattagcagaaatgtagtcagtagccaggcatagtggctcacacctgtaatcccagcacttgcggaagctgagactggaggatcacttgaggccaggagttcaagtccagcctgggcaacacagtgagacctcatcactacaaaaaataaaaacaaaaaaattagccaggcttggtggtacatgcctgtagtcccagctactcacctgtagtcccagctacttgggaggctgaggcaggaggatcgcttgcatccaggaggttgaggctgcagtgagccatgactgtgscactgcacttcaacgtgggcaacagtgtgagaccccatctccaaaaaaaaragcagtatagtcagtaagaaagaaaacaaactaacagtcaatattgtggctgctctcaatgttctttaaacggatcacattgccacttttttctctttgtaaaaatgaaaattcccagcacatattacatgctcaataaatgttaattgagcattttctgtctgagaagttcaggcaacttttcatccttccaattgttaagttctagtttcttattacaaattattactgttattattttaatttgattgatatgcaaaagtcaaatttgtgcaaagaaaatgcaagctttgagatgagaaagcgtgtcttctggtatgtttcttgatacattttgagggtattgagctctaatttacttaagatgaccttttgaaaatagattaacttatcaaaacttgtggtggaagcaagactttgtcagtacagtactatccaaattctaaagtaatgaatgcttctctccctctggagttagagacctgactctggggtgtggataaagaatttgtgtcctggccaggtgcagtggctcatgcctgtaattccaacactttgggaggccaaggtgggaaaatcactagagtccaggagtttgagacctgcttgggcaacatagggagactctgtctctacaaaaaataaaaagaaattagccaggcatggtgctgcatgcctgtagtcctagctatgtaggaggctaaggcaggaggactgcttcacgctgggaggtgaaggatgcagtgaactgtgattgtgccactgcgctccagcctgggtgacagagtgagaccctgtcccaaaacaaaataaaacaaagagtttatgtgttcagtaagagctgcagtcacatctctagtacagactctgcagagcactaggaagccccgtgtctgaatgggatatggtgagagaggcagcctagggaatggagatacctgggggtccccatctgctcctgatggacagctcagatgaccccaagaccctctaccaggcactgatggagtaaggatggagatgggaattgcattttagaggtaagaagccaagtggcatgatgaggagagtattcatgaaatttatggaacagtctgggggaaatgccatgatttcaagcccttcacctaaatcttcaaaagtggcatggatcagtgcctctcttccccagccaggagcgtgtgaagcatggggacctccggaatgttctcagaaaatgcttggttcttcctgtgttgagcagggaagaagctgaagctagcatgggcaggggagaagaaagccagttacatatcaaagaatgcttatctccgtagacaccactgtgtttgagagtcacattgggtggtttgtaggcagcttttcattttcacagccagtcaggcaaggcttggaataacttgtctaagaatcctcatcttaaccctgtgctagaacaacaagcttggaaggagccagccaacaggagaaagccagagcaagactctgtgctggacaagaagtcctgagcactggggagttgacttcatattggaggcagagaagaattacctgccgatggctgttggcccatggcaacaccctagatcsttgcatttgtggtcctgctgaaagaggagacttaagttatagagttattggtacttgcaacactttctctggaatttggccatttctctgctcttttagtttagtacgttctcttggttgcgaggaaatcactgaagccacctcacgtaatgtgagcatgtatgctcaaggggaccaggaaatgctgaaagttcaggcctcggaaaggacaggatgtggaaggatgttctggactcaaggaggcctagggacccttggcaggaggcattcatgggtctgtagtccaaggctccactaccatctccttggcttctctcttccattctagcttcttctgcttattcatcacttttgcttcctatgaaattggtgcatcctggtcttggcctctttgagccctctgtatagtgtgagctcatctggtactcttgactctctcaggctcctgaaggagaaccatcagatagaagcatctcatctccccaggccatgccactgggcctcagccaggcttgaactagctaggctcagtccacggggtggccttcaagcagcctagacttggatccctaagcacagcctgtggatgggacgttttaaggtaaagggaggacgcagagcattgcagcccgttggttgttttctccagcacagccatgcaaaatccatgtagcggcaggaattttgcagctggagttgctcccctgagactctgatcagataaagacagggtttgctgaacaccgtaggtctggccctgagccgtgggcagcctgatgagcacaggtgaatggtgcaagggataacctcacagtcatcagcaagtcttatctgggccgctgcaaatatgacggagtcagaaaaatgacaacataaagaaatgcgatgttttctatgggggtttctttttgaaactaaaagaggttttctagactcactccatggagaccactttactttccatttttctcagatgataacatctgcaggggggctccttctgtgggtacatcatttgtcaaatatgtggtccatattgagaaccgcataatacttattaattaccacagttgctacttaccgtgggctgctaagactgctttagatatactgcagatattcaaagagaattcatcgtccacccaacggcaaagtccatagaagcccaggatgcattctgaccctcatcctttaaagcttactgaacatattgatcacctcttttccaaaggatacttcctattggagtgtacttttaaaatctattttttttgtcttaatgtttagtgtaatgagggagtataggatgaactcaatgtaccttgaacatagctgttgtcaggaatgaagccaatttcattttgcctgaattagggccctttggtgtcttttctgtatgcagttaatacagttcgtgtgctgtaccaagggtgcgaatgtgacttttcatcaggaaggccgcatatggtgggcacagggcctagctctgccgttttatagctgcataactggtttcttgaccttttatgagtctctactcatgttttatatggagacattagtcatctcacaagatttttgtaatgattagaatatttgtaaagttcctggcaaaggtttgattataaattagcgtcatcatgaacgttcaaggtggggaccttttttttttttttttgaggcagagtctagctctgtcgcccaggctggaatgcagtggcatgatctcggctcactgcaacctcctcctcctgggttcaagcgattcttctgcctcagcctcccgagtagctgggactacaggcacacgccaccacgcctggctaatttttgtatttttaatacagacagggtttctccatattggtcagggtggtctcgaactcctgacctcatgatctgcccgcctcaaagtcccaacgtgctgggattacaggcatgagccaccacgccctgctaaggtggcaatctttatacataaaaaacaggaatgacttcttcgaattggtgcactagagaaatgttttccagtcgcctaagcgtttaagcatggtaaacagattaccatattagttgcccagaccttgcaaaacttcatagtgtttgtttgtttcccttgggaggctgttctgagaaggaaccttttcattcctcggagttctgatgtgttcattggcccctgttgtcatgctggatatgggggcggttcaaggggggcttgggtgcctgagaaaaagagtgaaaaacccaactgcgaaaacccaagagaaaccgaaagagtgaacactggaaaaaaaaaaaagggggggccggcgagcttcaggacctaagcggttaaggaactggctttgacaggaagtgggcaggaggctgttttcagtatgctcatgggaacccagctggaaagtgctgtggtgagtgtgtgtggaaaaaaggggctttaatcaagctataaatatctgtttctttgaagttttatgaccaacaattaatgttactggaaggcccataaaaagggytgtttcttgacttggtgggtctgagtgggccagggtcgggttaagatgctagcctcgtggggtgccatcctgacagattctactgtgtgcgtgtgtgtgtgtgtgtgtgtgtgtgtgtgtgtgtggatataatgtgttgcattggtgtctaaagccatgctcagtatatagttatatatttcattcattcatccgttcattcagttatctcacgtttctggagggccctctatgtgcaatasctagtgatacagcagtgaacaaaggaaatccctgccctcagggagctttcatkctacttggggaaagagacgtgaaagaaatcaagacatgcaagcaaggataagtgctgtaaagataattcattcctgtttagagggctgaggacaggaagacgatgctgtatggctctagacagggttctgtgatgagtggcctgtggacagattcctgtccgaagaggtgcagggtgcaagggaggaggggacggcaagtatcaaggtcccgagtgaggcacatgctcggcggggcccaggcatgccaccaaggccaggaggagagactgaggaggcttggccatgccctgccttgttggtttttagaaagactctgttttggttattttgtttttctttttttgagacatctggagtgcagcggcatgatctcagctcactgcaacctttgcctcctgggttcaaacaattgtcctgcctcagcctcccaagaagttgggactacaggcattcatgccaccgcacccagctcaaatttttgtattttttgtagataccatgttggccagcctggtctcaacctcctgacctcaggtgatccacccacatcggcctcccaaagtactgggattataggcacaagccaccgctccaggcctagaaagactggattttaccctgattgagcgagggaggctctcgaggttttatttggttctgcccagtgaccagccaccataaccacatccttcccccagactttttcctcttcctataaaacaaaacaaacaatgtgaacaacaaaagcaaaaacaaaaaactaagtagtagttggggcatttttattttaatgctgcttttttttttctcaccttttgctatatgctgatcccagtgcatgaaatttttttgtaatctcattcctgtgttgaagctctttcactgctttcgtgagcacagatgaatttgaaggctgccaggcagtagcaacatataccagcttccccactgggtgttcattctacccaatttttgttcatgtggacttcaggaatctgggatttatgatcttcggatttggctcttggcttgaggcttagcctgtgcagtcatcttggagagagggtttactaagcaaagaacaccccagaacaatctgggggaactgtgccctttgcaagagagcagttttaaagtaccctcgggcaatttagaagctcctactgactcaaggatattcttacctcttcgttaaagcagctcgcctaaggactttgctagataaaagttggttttctcaagagggtttctgcacacacccgaccgcatctttttcttttcttttctttgttttttttttttttttttttgagacggagtctagctctgtcaccaggctggagagcagtggtattatctgggctcactgcaacctccacttcctgggttcaagtgattctcctgcctcagcctcctgagtagctgggaccacaggtgcatgccaccacgcccagctaatttttgtatttttagtagagacggagtttcaccatgttggccaagatggtctcgatctcttgacctcgtgatcttttctcgcctcggcctcccaaagtgctgggattacaggtgtgagccaccgcaccgggcctcacgtttttcttttaaagaaatgtgtaattcagatcagtcttgctttcaggtagtctgaattaggggagtttgcctgtgtgcaagagaaggcttcctacttcattttcttgtgtgcagggagccatttatgactaataggattcattacatgtgtgtttagcccaccgattattaaggctttaacaatattaaaacctaaagagataacagaggggaagcctttgggagctaggaatcaatcrtgctgggtggcttgaaaacagggcagtaaaatggcagccgcctagcctgtggtctttaatattaataaagccagaggcgatatcacttagttgttccaacatgattggttcctcatggatgtgcacccttgctcatcaccatctcaccaccaggctgaccctatacatcttccaggagcccagctctttcccctggaaatggttctctgagtttcagctgcagttcagggaaaaggccagcagccacgttccttgttttgtgtaattggtctttagcctgatctgattcatctggcgaaacccctttttccagtaaaagtcgttggcgaggagtgaattgtgatggaaacagagacagatgtatgtacctttcatggacataatttccccaagactgaacacaaaaatgagggtttttggagatctctctggaattaatgtaaacgttrttgaaaacatattattctatggctccttcataaaccctaggccatcccgaggctgtctcactcaggcccctcagccctcataaccccccagctccataggagtggagtttggatttcaactagataaggcccattttcatggatggacatgtgagttttcatctataatatagaatgctattttctagttaggttggagcaaaagtaatcgcggttttcaccattatattcaatagcaaaaaccgcaattacttttgcaccactactttttacctagcagttcaacagctgtaaagaaagatgctgagctgttggttacgtaactgtggtacagccatttcatagacaagtctacatcaatgaaaagaatgacacttctaaaggaaaaaaaatgggcaaaaattatgtgtttacatctatcagaaaaacaaaacaaatgtcacggtgtggttgggaggaggtggggagagaggcagattttggaggcgaaagatacacagaaacactaaatacctgtctattaatrctgacagtagttgcgtttaggggatgagactctaaatttgtttatttaaattttctcattttaaaaaatgagtcctttcaattatgagatcaaaaagaaatgttcagtggcttattgtgacccaacatttttctgtttgatttagatagagcttttatttgcctaaaaattgtgcttgcaatatatatgatgatttttttttcttttattaaatgaaaaagagtcatttaacagtcacagtggctcagccaccacccgcagcaggcagtgggcccacttcaccttcccagcaggcctccagtgcccggtgcagggtggcccattggcacccacaacaaacatcacgacattacttttaccgcacacttcctgtcgaggcacaggcagtgcttcagcctttttggtaacttgaatgaacatcaaaaggataatcagatattagttaaacttgttcctcttctccaatcattgatacttttctctcttgcttcccctccccctgcccttcgacacagagtgacaggcctgaagtaaaaagggwaaaggggaaccgagtgactcagcccagagtgggcctcaccgcagcttcctggccactttctcgctctctccttccaagagagaaaggggaggaagcccagagccttctatcacttagtaccgtgtcatataccacttccacaaatgctagggaatgaacgaatacatgtatgaatgaatgaatgtccatggggtcactcagaagtagtggcataatttagccagataaagtgcccacctagcactcatcccacctcctcactcctctatcctgtgaatgcagaaatacaattcctcatttacaaacarctgtgcatgtagggttgcttgcaaaagttcgtcgtgtgccgatatttcattaccacttttgccagcgctctcgtctgcatttcctgaggtttttcttttttttttttttttctttttttctttgatacggggtctcgctctgtctcccaggctggagtgcaatggcacgatctcggctcgctgcaaactccaactggttcaagcaattcccctgccttagcctcccaggtagttgggattacaggcgcccgccaccatgtccagctaatttttttgtatttttagtggagactgggtttcaccatgttggccaaactggtccagaactcctgacctcaggcagtctgcccacctcggcctcccaaagtgctgggatgacgggtgtgagccaccgcaccaggccatttcctcagttttaaaaagcaaataasaaacaacaacaaactgcatcagagtaaccgtttcaaaaacccatctcaggtctgttttttcttttttttttaagttagcattttctagaagttttggtataaaatatgtacaaggatacatatataaacttagtgaccatctgaagataaacctggaatgaggaataacaacctctcatttaaaggagttttaaagagacaagagggaggaaacgagaagagaatgacagtgtttctttcattaaaaggagcccaatatttattgagccaacaggtttacactgtgtctaccccagagtgtcatcagcccaaaccagatcagcgtcgtgggcgatttttttcactttactgctgaggggatttgccaatcgcctggtcagcttctgaattcttcgggcacacaggaggggcgacatggttctggcttatttctaagtccctttgaggtgatttctggtccacaaattgaggcaaaataatcctcacaatttcttggatattctctgccccagccccgttctattgcaaaggagscttctctaaaaggcttcccaatgccttagaatctacttaagggtatttttgctggagaaagagctgctgtctttgtccacctgtcgttttcctttctaccccaacagggctttctccctctggctgttttatttagcgggagaagacagaagagatggaaaaatggaccctgcatttatagctgttccttcaaggagctcaaactgctttcaggcatttccttattacctcattaatcctcataatggtcccttggcagaattattcttattttcagaatggagaaattgaggcacggacaaaataaatggcaggtggaaggtcagagagccaggcagcagaagaggtgggggcagcaggatggcttctggtttctgccctggtccatcagtcagaatgtcctcttcagatgaggagatgcagggtgaggcgcgggggagctgacattgcataaataataaaacaaatggagccacatttagttatcactcatctagcggaagtcgatcttcttgggacatgagtaggctctaacctggcaggtttttcaacatggaaccattatttgtcacatgtgttctgtgtgccagggactgagttcttctcaacggagtttacatgtgagaggagcaagggacaaacctcacaaataggaatacagacctcagaaagccgacttcacccttgcatactcctccaggttgccctcgcctcccgcctggatcactgctcaattctctctctctcttttttttttttttttttttttaagacagagtcttgctctgttgtttaggcatgatctagctcactgcaacctctgcctcccaggttcaagtgatgtttcccacctcagcctccctagtagctgggactacaggcatgcgctgccacacccggataatttttttttttttttttttattggtatttttggtaaagatggggtttcaccatgttgtcaaggctggtctaaaactcctgacctcaactgatccgcctgcctcggtctcccaaagtgctgggattacaggcatgagccacagagcctgaccacagtcctttcttttaagggcctcctggcacccagccatgttgggaccctttcagttctttctccacggagaaccagaatctcctttgaaaatatgttagatcacctctttctcctgctccgaactttctgaaggcgtcccctgttactcggagtgcaagccatgctctcgagctggccatggcatcctgcgtcctctcccttcccccattggctctgttcttcctgccagtgctcttccccctgctcactgggttccagctgtgcgggcctccctgctgttcaatggaatgagacccatgcccctcctggttatcccactcagagtgcccttcaacagctacagggctggcccatcctttctctgttaccttcggaggaagccttctctagataccatctttaaaacagcaatcttccttctccatccccagcagcacctctgacccccttcacctsctttatttttctccatattatcattgccatcaatccaagcacaatttccagttacttacccattttgctttctccccgctctttgagaatgctggctccaacagggcaggtatttcacctgttttgtttatgcctgcatccccatcactaggaacctcataggtgcttagcaaatttttgatcttaatacagaaattgactctcacagaataagaagaaggagcttgaagccgaggtttgtgcccagaagatctcactagattctttatactctggggagaagaaaggatcagggtcgggtggggacatctgtgggcatattggggagggggccaggaagaagccaggaagggggcatgctgtcattcgtgggttttgcaactttctgtggcatagaaggcatagaaggatctcttcatttaaaaggtcaggttggattttttttttttaacttcaacaccagttaacttacttgcttccatcataccctgtaggtactcgttatggacaggaatacatgtagggtgaaggctgctctgggtcagtggattcacagagaagtcagaattctcttttataaagagcctgcttttctcaataattgcataatgacgtctttgattcccaggccctcatgcctagctgtttccttaggcatttattcaagatccgagatgccattcgcaatccagcaggatgcatatttgtatctggctccaaaactttttttttttttttttggcccacatcactgcagcccatggcagaagagtctagcaattagcaggaactgaaagtgataatttattgcaaccaacgctgtgatctaatagtcacacattacaaaagcaaaatccatattttgttcgcagtggcaccgcagcgctatcatatgctccacatgctttctaatgtcttttgtttgtattaggaaaaaacataaccctctcctactgagaaccagagagagcccctcaggttctgagaatgacgacattcaacatcgtactccaaagggggttaggtttgtgtgctaggggtgaacgctgtgcaatttaattctgtttccaaaagatctttggaggataaaggatactttctgtcttttatttagggaaggcgatcatgttggcacagggcataagagagtagcggggctgagagtgggaactgaggagattcaagccttttgcccgtcgatcgcagttcagatctgttgattttgaccattgcatcttgcctcacatctgaacttcaggtgaagtttcaaaccaccaggcaacatgcattacaggcaaaatgataagtcaggtcctgccgggtgactaaggcagtgtggcaatgcttcaagcctttaaaaccatatcccagtggccccaaagcattaatatgtctggaacattgcctgtccaatatctagagaggcgcctgcagaatttgattcctaggtacatcaagtttttgagctggaagaaacttgagacgctctttagtccagcaaatttcaaacctgtctgctcatcagaatcacctgggagcttgaaaacacacagatgcctgggcctcaccatccagagagacattcatttgattgcagattgaatccagaagctctaagcagaggcacagtcacatttggggactccttttatttagtagaggaggaaactgagtctcagtgtctgagacagacagtggggattgaacacagacacctgactcccagtgggtggtattttctcctagagtgcatttctgcttcttaaccagcagaagaaagcccattaactaacccctcaggggtcaccatgggcaaaggagtgcatattaagaactgtctggaaagaaaagaaggtcattggaatcttcttcaccccttccctggtactgatggttgcatttcaatggatttctccaaaagcaattatcacagtgttcctgtgtgttgagcaaacttcccttgtaatcaccttagcgttttcttttgttaaagagtaagaagaatggtttcatagtgaatttttcctaaaatgtgcagggtgtagaagaaggaattgcacacaatacatgtctactaggcaggtcaacataaatgagtagaggcaggtaataacccagatacactttgttggaaagtggaatgcatagaaatggtcttcatttctgcaaagaaaaatgtacattctcctttttttccttgcaatatgttgccttctctgtatatcttttaaaatttctacttctgatagagtaaagggtatagttttgtccgttttgtgttgctataacaaaatacctgagactgggtaattcataaagaaaagaagtttgtttgattcacagttctcatgcctggaaagttcaagattaagcatctggggagggcctcaggctgctttcactcctggcagaaggcaaagagaagccagtgtgtgcagagatcacatgggcagagaggaagcaagagagaagggaagtgccaggctcttttaaacaaccagctcccgtgggaaatcacagagggagaactcactcactaccatgaggatggcatgaagcccttcatgagggatccgtccccatgacccagacacctcccggtaggctccatctcctgacatcttcacacaagagatcaaatgtcaacatgagatttggtggggacaggcaaaccagatccaaaccatagtgactatgatatatctttcacatttctctttacaaaaagaaaaacaatgtaaggtcccgtgacaattagccttactgccggggagaccataaggagtggtggagactgtggtaaactgcagcgcgcacactctgttaacagaggaggtcactttccattctagctgactgttgtcatatgaggatacacaactatgctggccagtttctttaattttttttctcttctaacagaatctagaaatgtagattgtgtgtgcgtgtgtgtgtgtgtgtttgtgagagagagagagagagagagagagaaatctttaggagttttaaatattggcaactaattcaatttatttctgtttttaacatattgcaccaaatacatgggtatgggccgaaaataacatgaactttttgcagtgtacaaatctctaatttgagacttctaatgaaaagatatttggttacagtatgagagacaagggactaaaataaggttgtggatcattcagggttaaatcagagcaacagcatgagtaggagatatatagaaacagatttattgcaaggagttggcttatgcaatagtagggttgcctaggcaagtctgaaatccatacagtgggcagtcgagagaggcagacaggaactcttggcatatgctaaagctgctatccacaggcagaatttcttcttctccaggaaaagaaacagttcttctcttaaaatcttccaaatgattgactccgtcacactcagaccatctaagattatctcccttcctaaaaggcagctgaataagggcttcaatcacatctacaaaatactgtcccagcaacaccttgattcatgtttgactggataactggaaactatagcctagccagggtggcaaacaaaatggaccatcccagggtagatgttaaaaaaaagatacccaccaaagataaataagatcaagattagaatgtcttcttttgataggatgtctgatttttctgaatttttgttcctaaaacataagattatttttaaaagcctgagaaacgagacattagtgatccgattcagaaaagaagccctgggtttaagccaatacgagatgggtttgtatctttaagtggcctttattaccacagtaataaacagcaaacgggcccaaatcttacaggcttgtgttggctttgaccaatgaagtagaacaagacctctgaataccccgttagttccaggctgtgctttgatggctctgcacagacagctcttttcctatacaagtcaccagcctcacccgtgtctcttaacaaatgttgttgacaggccgcgttgcaatttttctgcatgttctgacagtttaattcagtacctcctagctaagcactcagcctaagggggtgcttcagcaccttggcgtcaccaggctgcaattaaaataattcagggactggggctgggcttgcagaaataggccttcttccctttggaacatacaatgcattttccagtctccccgtggagcacacgagatccttttagagcagagggcagtggaatgtattaacaagatgtccactggcaagaactagctccatttgtatgttgcacccaacggggttttctccataggggttaggcgtaacgtctttggtaaacttggcacctgtagaaaggtcttgtggtgggcaggggggtgtgaatgggggaatgagaactagggaacccaggacccaggacccaggacgagagttcagcaaagaccatttacagaagctatccttccaaaacggccactcagaaatggtgtcttttattttgcattctgtacaggaaggacaaatggagaaaagtctccagaaattggcctcgtttgaaaggacctcatgcaaagagagatctttggagacatttcagaaaggtttttattcaaacatattcgcagcttgtatgacagtggaatgttttgaaatgagcttgattctgtttacccatccttcttaatccaacaactctgctggtctctctgctgacacaagatcgttcgcaggttatagaaggatttaacacgtcaggtaaggtggaatttggtaaattccccaaatttacaaatagatgaaagttgggtaaattccccaaaattacttgatgacaaagatcatttgggagagattctttcaaaaatgcctactccctattcccatatcccagcctaagggaatgagtttaagtgggtctacagtgggtcctgggaatttgcttcttatctagcatccctggtgaatcttttcattcaagccaatgcaggaagtagtcctctgaaatacatgtccacagaacacgccgtgctttccagaagacgcaacagacagaaactttccaaagggaattacctgggatcatttctcatcctctctctctttctctgtattacttagccttaaaaaaaaaaaaaaaaggactaatacttcctgctttcacatctactttccagatagttttttctagaggtaggaggtacataagagaaacgtgttttatggctgtggttttcaagaagtacagcgttttggagagagtggaaggctttcatgcatgaaacactcagggaggtaggagatccatgagatccaagctaaacaattctggaagagttacctgaagttgacacttaattcaagctgcatcatcttcctcctcccagcagatgaagaccaaaggtggagggtggtgggggtggggggcagggagtaggggggagggggggagggggtgtggggagggtggggcgggggtgggcaggttcagggactgaggccggaagcaaaacaatgtactggagtgcttatagtttttgaggaatcagtgagaaatgtcatctgaatgtctcttctcaatctttctgaaagataacttgcctataaacataaaattaaaagcctgctgtctgcttagttcaggtattgggtcagcgtcttgtgactatggacaagaggtgtttgactctaggactcasctacctcatctgttaaatgggcaaactgggagggtgtttatctgcatgcaacatctccttccatttgaaaacttttatgaatgtatggaatattattgagctggtgtgtgctaatacactgctaggagccattggagatttgaaatgtgagagaatgcctgctgtctgtcgcatttaccaaacatcatgcttttcaagattgttaaaagttgctgaaacccttctttgaaggaaatcatactttgaagctcaatatatagcaaacgggtagaagagttgctaagagtttgaaaatgatctcattaaacaagaaacatatatacagtgcctacctaggaaagagccaggcatataatagccactgcataaagatgtcaagtcttttggacacaatcctaatatctcggaggttctgaagctaaagggtacatgtttaaattttatttgtttcattaaacacctaaagactctttctagctcactcctgccaaaggcagaacttgagagtggcattcttttctggtctttgaagacgacaggtgaagggcagaatgtcctgtgtacttgggcacgcacatgcaaccctggctggtggctcctcctctctgtcctcttcctccctctcttccttctcttccttttcttcctcatcctccttttcctcctcctcttctcctttctcctcatcctcttcttccctcttctttgtgtccttgtttccatttgcttcttgctttgggcaagttctcaccataaccctctggcaaaggcaaatattcacctaagtggttaagtctctgggcatatttgttgatctctgctgagtctctcagcccgttttcatccctcctctgcctctccctagccattagccaaggccttgacctattgactgcagtgttgccgaagcagctggactccgtgtttgaaaggttttctgaagaggcatctattaatttatgtatttaatttctgtatgaagtgactgttctcctcccagcacaggtattaaagtacctttaggggaatccagcagctgaaatcctcagtaaggaaaaatgcttagagtgtcacaaagcaaacgcattagtgggaaatgtttaggggctcaagcacaaccacaaggattcactccttccttggattttgtgcctcttcccctgttcctgaggcccccactgggaacccttagctggagaacacccgtttcattatggaacatggagaaaagggtgattgtcagctccaatttattccatamtatctgattcaatctgtagtttgactttgctaaaggaattaatttttaagatcttaacaaatccagtaacatttaaaatgacctatccagtccatgcatattagctattcataaagggttttaaacattattattaatcctagatatgttacttaaactattaagtccgttcaaggcattcagtttctgagtcctcaaggatggtaaggagagctgcaaatgggctcccttctcaagcaaaggcatcttatgccatcatgcacgtttctacacatctgcctgtagatacactctgtaggacaaaccaggtggctctgtccttcaggcaaagagctccttaattgaaaatgatgtgtgaaatttcaagagagaagtctaggaatggggagatttatgtactatagtcagtaaccaatcctgagcaaaggtaggcacagctatgtggtggtgcccttttttgggggggggggggcgggtggtgggggtacttactaaggaccttgcctaagataatcaacaatttttctttttcagccctgggaggctctaaagctggaatcaaaaagattcacaaccccacaaataggtgaactactctaaagcaatggttttcaaaccttgaaatatcctaacattgaaaaaaaatgtggtaacatagggttgcctgtgtcttattttggtctgtaaggacattaataatgttttggtaaaacctcagttatcatctgctattactgttatttcataagacacatcattttccttcaaaattacaatgaaaactcataagcatacatcaaagttgaaagaattttacagcgaaccaccattaacattttgctataatggctttatcatatatccattcatccgtctatcatatttgtaaaacaaayaatattttaatgccaaacatatacaaaggatagatcagtaatttccgagaaatattagttgacaacttgacatcaaattatgtacggttaagtattgatacaaaaatacgcacgaatattaagtgttgaggcagatagatgcacatatgtatgtcaccatgtacctttgtgtctccttgcatttaaaaatgcaggtcatgatgtgtaatccccgttcctctgttgatcagtgaacacaaatgctgggccccagcatgagtccttttcagagagtcatttggagacctacagaaaaaaatgccaagaatgcacgctgggaattcattaagagatttcaggacgttgaaatactgtgygtacttgcaatccccacttgascaaagstgtccaaacctcgacagacagcggccagagaaggccccatcatagactctgcgcctggctaattactcaggagcaaagcaggtcgttaggggtcagggggagggtgcacctgtccgccaccccaatttcctcatgatactggaaggcagtctccggtcagcacggggctgggtctagagttttcagttyacaaaagtggaaaatgtgatatgacagactggawccagcacagggacgcagcccctcacctgctgggggtctttgggtgggtcctgtagccccagagcctctcgatgasctatgaacaggaacagaaccagcaccccgagtggtgacagtgacaaaagggtcctcagtaacagcagtctgctattgttttgaatcattcaaaggaatttttttattttgatagtgaaaacaatttcttttagatgtagaaagggtagaaaatacagataagcgaaaataacaaaagcagaacggtcatcatctcaaaactcagagaaaagggcaccaactccatattcgtacccatgtacgtattcatacccatatctatacaccttcccttatccctgtccctgtctacacccacacccatacctaaaccaatatccacatttatatctatacctatacccatatcaatatctatatttaaatctgtgtatttagatatttctagaaatgcatatatagctatttttgcttttataaaaaaagtcacagaaacaattatattgtacacagtcctatataatctgctttcttttgtttatagaatactgtgaatgtctttttgttttktttttttttgtttgcgagacagggtctcactctgtcactcaggctggagtgcagtagtgcaatcttggctcactgcaacctccatctcctggatgccagcaatcctcccacctcatcctcccaaatacctgagactacaggcagtcaccaccacacccagctaaatttcttttgtgttgctatttttattagaaacggggtttcacctttttacacaagctggccttgaactcctggactcaagcgatctgcccttcttggcctcccgaagtgttggaattataggcatgagccactgcactgggccaggaatatctttctatgacagtaaatattattttacatcattttcagtgataccatagtatcccattatatgcttttcagtaataagttcgaagccaagttcctggatcagcagcatcagaatcacctgggaatttgttagaaatggaaattcttaggccactccccagacctactgcgtctgggggcagggcccagccgtctatatttcagcaagccttccaagagacttcagtgcctgctaaagtttgatgcctactgccttaaataaacttcttcatcccttgtcaaacttcctaggggagcacattttgaatttttgacctgagacctcaaaacttttacctgtgctcactcagttcaggtgaaagaatctttggcattcagaagcttgtgttcacactcacctacttctcatggcatgattcctcttacctctaaattctactgacttaatcaagattgagggattctgggatgaatctggggacactttttggtccctgaaataaaatacgcaaactttggagtatgagtgcgtatttggggaaagtatacctatcagattttcaagaacttcatgaccctaaaatgactctttcttaaaataatttttttttttttttttttttttttttttttttggagaacggtctggttctgtcacccaggttggaatgcagtgtcaggatcatagctccactgtgtgacctcaaactcttgggctcaagcaactctcctgcctcaagcaactctccagcctcagcctccgagtaactgagactacaggttgtgtgccaccatacccagataatttttttttaactttttttcttttttttttttttttttttgagatggagtcttgttcttatgccgaggctggagtgaagtggcaccatctctgctcactacaacatctgcccccygggttcaagcgattctcctgcctcagcctctcgagtagctgggattctgggtgccccccgcaaccatgtcccacgaatttttgtattgttagtagagttggggtttcaccatggtggccaggctggtctcgatctcctgacctcaggtgatgcacccaccttggtctcccaaagtgctgggattacaggcatgggccaccgctcccagcctttaactttttgtagaggcagaatcttactatgttgcccaggttggtcttcaactcctgagctcaagtgatccgcccttctccgcctcccaaagtgctgggatgacaggcacgaatcaccgcgcccagcccaaaatgactttttatttgttatttttgatctcatccttgctgttctgttttgcccaggttggtcttcaactcctgagctcaagtgatccgcccttctcggcctcccaaagtgctgggatgacaggcacgagtcaccgcgcccagcccaaaatgactttttatttgttatttttgttctcatccttgctgttctgtttttcccagttatatcaataacaaagaaaagaaaagaaatctactcagggtctgttgggcatactgcccaagcacagtgtgaaatgactgccttttcactttttatcttttggatagcccaaagaccagcctgacttagcagcctgatttttctttgctggaggcagatcacactctgcagatctccactgaaaccccaccctcacccttcgtaataggcgacatgcacattttcatgtcacatttaaaaatgaaatttttcttgaaaatgttcacatccttcccccagaaattctagatttataaatttctcccaaggaaatcattaggtgctacctgaaagtttatgtatcaggtaatgatcacaaaattataatcacaaattaaaatagccataatgtctaataattcgacattagtgacagagatgatactacagttataggatgaagtgtcataactggggattttggaaaatgattagggacatggtgaagtcgtcatagaataaaattaagtgaaaagagtcaggttgagtgtagaatatatttattcctattcagcatatgtattacaaaatatctgggataaatgagaactgcatgctgacatttacattttctccttgattgtcttatctattatcaggattttctacaatgaacatttgttggtttataattggggggaaacctaaattcataaaataggcactctgttggtggcaaggaagcccactagtccactgtctaagtgttaaatggattttagcttcataattctggctttgactagaccctcttacaagcaagactatatcctctgcaaaagcatcagcggggtcctgcagtgccttcttgacacacacatcagtgtatacccagagctcttgtttctaaatagctgagctgcgtattaagtatggctaaccacacatccatgcatttttctggtgtctacctgaccacccctccaggggagagataaactcaaaggggagaaaaaggtatgggagcgaaagattgcaaggtgcaggtatgtttgcagatgaagggattgtccaggctgagctgtgcagtcctggatgaaccaccatctgggcacttcatatgccattcatacttaagggtgattggctattttcatcatcaagaaaaacattgctttaaaattttccatagttattcgggcatggtggctcaagcctgtaatcctagcactttgagaggctgaggcaggaggattgcttgagcccaggagtttgagaccagcccgggcaacacagtgagaccccacctctacaaaaaataaaaaattagttaggtgtagtggcgtgtgcctgtaatcctagctacttgggaggctgtggcctgaggactgcttgagtcctggaggtcgagactgcagtgagccatgatcatgccgctgcactccagcatacgtgacagagcaagaccttgtctcaaaaaatttaaaaaaaaaagttttttttttttaatcgccataatcttgtgtgaaatacttggtcatctgagcaacattatccttcttctccccatcagcctggcatgagcttggcagatgcaagctcagatcatcacctgtgtgagtgtgttgtctttgtgtccgtgagcatgtgtgtgtgccctgggttcctctcccaggtactccagagctcttgacaataaatgagaacaatatagaggcagggggcacttttcatctcaggccagttccaggactctgtgtaaactgtactaagccgaaacgtattcctttgtcccttttgccgctgtcctcctaatccacatctgggcagtgtgcactgtggctgggagttgacacagatccttgtctcccagacccccagtttctatcgagctactgtaactttaaaaagatttaacaaagactmcctccactagctaagctgaaataagaatgtctccggagtttaatggatcaagtagcggtgataggttttatggctcttttttactttagggcatagggaagagagagccgggcaggttggttttaaattcaaggatttatgttgttaatcctccgggctaattataatttatgggatcttggcaaattaatatgcagttgctattcaaaagtggagagcaatgtaaggcaggcataaacaagccttgttcatttttaatttatttccaccaatggagaatattaaataaaatgaacactggggtatttcgctccaagtttggtgttcattatttatctctaaattatgatattcatagaacaactccttgctttttcacsaagaatctagaatctagaattatctgagcgttcgcatcagataactaggaagaaatcagagtcattttctctctaaggcaggctcgatgatacctgcacagaagcagaggtttcccaagcatgcatgttactgcagtacaagatttggcattctgcatgttggggttgtttagaaacagaaactttggagtagtatgtgagcttaaaatgtcagttgcatggaaatgaaagtgccaaccctccaaatcaagagtccagcccgttatgtcgcaagggctttgggaaatctcaatttattgctagcctggtagatattgagcagggtgtgatcctgttattgggctttcagactttmgcttagcaacctcattgcacccaggacccccatttaatcagcgactcctatggctgtttgggggctctctttcaaataattcttctcacccatgaacatctgtcagaaaactttcactgattggcaaccaccaggcaggtaggtttgactcatgtgataattggttgcaccactagaaatgagaatgcccctcctacttccccgccacctcttctcctcttacctttttctccccgacatgcccctgccaacctccccccatcattccagctgggagaggccatcaaatgtagcttggagagctatagaaaccttgagctctgagcccaaggagcaagttggagtcctgcctccagctgtgtagctcagataacagctggagcagagaacatgctgttctctctgctagaatatctgacccaattctgactagtaaagagagttaatagtttgtacctcaagtcattcttgtccctgtgtgaaggaagagaagcagtcatttccctccacctccaacacacactccgtccccactctgtctctcttggctgtttttctcttcattgttgttaaactcacgttcatttctcttgtagtcagggaaatgaagagccactttcaacaattctgaagaagaaatatgggatgttttgcttcgggatggaggctggagcaggagtttctggagtctgccagtacccagtttgaatcccagctctgccttttatcagctgggtgttgggcaagttagctgacttttgtgagttttctcatcattaaaatgagaacactgttattggtctttcgggattgttttgagaaatgagatatcgagacatgcctggcacaaggccttaattcttcttcatggtmaagaaatggcagattttcccccttccattcccacccttgcacatagtaggttctcagcaagtatttgtagatgtaatcgaccagcagagatcatttgtacccttaacacccacagagagtcacagatgctttcactgaaggagggtgtcccaagactcaatggcagggaataaaaatgccaagtcatgtaagtattccacaaagttagaggggaggagtaagtatctcttattcgtgcatctttatggtatgaccaagggctcatgatttgtaagcagttcaggcactgagacccgggacacaggtgacactgtatctgcagattcctttttctcattgtttctctgtcatgtttaatttttggttttgaaaacagcagaaaatccaaccagtgtgttcacaggacttctggctttgcagcaattcctttttctggggtcttttgcctaatcgtttactggtttggagacactgttttctgtattgtttaggactgaaaatgtagacctaactgaaatcaagcackcgagtatcctaattattttaaattcataatgaatagtcatcatggtttcactttttttatgtactcttttgaaagagtacgatgggggaataaaagccagaaagttaaaaaataaaaatagaaaagagctgcaattgtcaagagaccaaaaagtcttgtaaaaagggcagtaggtaattctggaggcaaatcagcatgggtaatgtctaggcaaacaggatagaaaaagatcaggaggtcacagtgacaaaagtatttaggctcatcatattagaatttcatccaaagaacaattgattatgatttatagaccacaccatcccatgagcccagatgtgtgtccactgggcctggcaggggacaaatttatgtaacagactccatcctgaattccagtcctcaagctttgagggtaataaactcaagctttgcaactgggtcaagatcaggcctgtctccttcttgatgatgagttgtctcataggaccctgttaagcaccatccccaaactccattctttttggtgaatatcccaacaaactccccagccatacctcaatgtccagacttgcctgatccccagggctggacacagaacaggctcattctgagaatcttctctctctccctccttcccattttgctcctcctaccaacatgagaagctagggggtctcatctttaaataattaattcttctttctttgtaagtattatacatgccaaacagactcttggtttgtgtctactgacccaacaaaagggctgtccacttgacggacaggcaacagatcatcttgataagtacatgaggcactcagatgtcaagtcaccaaaccttcattctgaatatttttgaggctcatgacagaccaaaagagccagagagttggggaacataatttcctttgctcataccctggaccaagaactgttgccaggaatatccatccatctgggggcttccagcttccccagatgcctgcgtgccttttgacccttctccttcccccaccctgcgagttcttcaacaaatactcttctaaaccaacatccccggcaaacgggagcaagacaccagcttttcactgatgcagatatttctgatcttttcatctcggttttatttctcactctcccactgcataaaagattaagaaagcactcgcatgaatgtttgcacatcatttaaatattcattttcattaatttattcatagtcgtaaagtttattgcctagaatatagagtcgtagaattttagagctggaagacaggagagaaatcatctagtttcgccgcctcgttttacagatgaggaaactgaggtgaagacagctcaggagaccgtccaaggtcagattctgaagtgagccaagtgagacccaaactcaagtcttggacagtctagcctctgtgcagcgcagctcagcacagctgaaaaccacttttgctctctgctggcatagatggctgtgctttggttcattttcttgctcatcttcatgatctagcaagttcttgttgagtgccagcccagtgcyaggtgctgaagaacaatggtgaacggcacagtcatggtaccagaactcggtctggtggaacagagagattaagcaatcagaaaaacatatgtgtgtgtaattacacgttgtgataagggttttgtggggaatatacaagctcaatgtggagactagtggtgggagggcagaggcattttcccaggaagtggagaaagggaaggggaagcaaaagccatcccagggtgcgttagggagcaggtactgctgtggatgacgggtgaagaattcacctgggaaacttggggagaccatgtggaacatgccgtctctgagttatgccccatcagggggcaaagaaactggagtacttacccaccagatcctcatctgtcgttggttgaggactgctctcaggacattcacatccaggcacttctggtccacaccttggtacaatatttgcaatattagggacatgctaatacaattattcattgtatatgttaattcaaattaaatggaatgtcctatattttatagggcaaacttaggcttacgcctgggtggaatgagcaatccctgtcgccaaagaaggtccccagcatagcagttggctggagaaggaagggctgaccataagttgcactaaactgctctcagcagggtgacctggaagatcttggagtgtagatgtcaattaaggcaagtcctgagggctcggatggagccaacttttcacccgaggaggggaagagggagggttaaggagggcaaaggagagatttccaggcaaagtgcacattaaacaccagatgcgaagagctagacccccttaatgacaatttgctttctgtaatcttgaaccagggtctctcagtgtgtggaaggaatgtttgaatcggagtagcagggctgagtggcagtcctaaggcccagccacaacgtgttcttgacaagccatgtctatgtctggcgatgtgctcgcatggcacatgatcctgtttgacttcctgacagccccaggtgctggcctaaggccttccaaatgaggaaggaaggctggaagaagttaagtcatttgctagtaagggttagagccaggatttgaacccagatgactacagagttcatgcttttaattgctgcttgttaagtgcatctattatgggttgaattgcatccccccagaagatatgttgaagtcccatcctgttacctgtgaatgtaacctcatttggaagtagggtctttgcagatgtcatcaaattaatgtgagatctggctggattaagatggagcctcaatccagtgactggtgtctttattagagaaaagagagggagatttggagagacacacgtgtgtgcacacacatatctacgtatctacatgtatgcacatacctacatgcatgcacatacctacatgcacacacgtgtgcacacacacaagcagaaggccatgtgaagatggaggcagatactggagcgatgctgccataagccagggaacagcaagcattgccatccaccaccaggagctggaagtggcaaggatatgttctgccctagagccttcggagggagcgcagcgccagagacaccttgaattcagactctttgagttcctgaataaagagagaataaacttgtattgtttcaagccacctagtttgtggcactttgttatggcagccccaggaaaggaacacagcatcccctgtcaacaaaccaaggggagctaaagatataccctttagccaagtaaaccagctgccccgagcaggagcacagcttccagatcactcatcaaggggccgtgggtgacagggctggcctgctgctgcctttaatgggcgtagatgttgttgttcatgtttcccagcccattggtgatgacacagaggcaggagccggggctgcagactaaattatatacatctcaagggcagttagacaactagctcgcccacaggaacattgcaataagcacagtatctgctttcccagcaaagccaagtgcaagttcctgcctgctctgatgacctcttgtgcctccagtgtgggaagggaccaggtccctcaatgctgccgcctcccaccctgtgctgccacgtggatttaactccttcgtgttccccatgttcttagtcagtatggttgttgtgccatggattcaaatggggttgcttgatttgatttgccctttacttggctggaattctctctaacaatcaatggaaacacagctcatagggatgcatgtagcctgtctcatatgtgaaaaagaaactttcaatgtatacttcatctcattccaacaagaattggaaacagcaacatcaggacttatatggtgcagggtggtcagtaagtaggaaagaaactcggggcatggaagtgaacaggaagcccagagtgaagccaggacccaaaacccacaggtgctgctcttgttataagccagccacacatttgtctttgagccttttagcagctgccacaaactgggagaaaccatcagttatgcagtttacaatatctctaaactcaaaacaagccagtaattcagaaaaagcccagttcttctcacaaagaaagatctaagtgtgatatgagagtatatgcatggagaatattttctgagctggtgatgagctgcagggggcctctcccagcccccgcactggttgcacttttaaataagagaaaaaaacagtgataggactgacctgcgtgtagaagtttcaagttacaagaaaaacacttcacaggatccaaatccttaaagtcctgaaggaaacagagagcatatacaccagctttcgccacccaattcggatgtgttagaatgaagagtctcttattttttaatgaatttttctctatttaaaagtacagggatacctcagagatattgcagatcccgttccagaccaccacaataaagcaaatatctcaataaggcaagtcacatgaattttggagtttcccagtgcatacaaaagttgcttacacgatataatagactcttaagtgtacaatagcattgtaagaaaacaatgtacataccttaattttaaaatatttcattactaaaaaatgctaatgatcatctgagccttcagcaagttgtcatctttttgctggtggagggtcttgccttgatgttgatggctgctgatggatcaagttggcggttgctgaaggttggggtggctgtggcaatttcttaaaataagacaaggataaagcttgctgcatggattgactcttccttttacaaaaggattctctgtagcatgcactgccgtttgacatcattttactcacagcagaatttatctcaaaagtggaatcagttctctcaaactcgccactgctttatcagttaagtttatggaatattctaaatcctctgttgtcatttcaacaacattcatgacgttgttcatgacaatgttcagtgttcgccttcaggaagagcaagttccattgcaagaaatcactttctttgctcatctctaagaagcaagtgctcatccattcaagttttctcatgagattgcagcaatttagtcacatcatcaggctctacttctaactcgagttctcttgctatttctaccacatatgagtcttgaaggggctcaagacttacttcctccactaacttttgaacccctcagagtcacccaagaaggtggaataaacttcttccaaactcttgttattattaatttttgatcctttgccatgaatcacgaatgttcttaatggcatctagaatgctgaatcctttctagaagattttcaatttacttagcccagatccatcagaagaatacagtatctgtggcacctgtaggcttctaaaatgtatttctttaataataatacttgatagttgaaattactctttgatacataggctgcagactgggcattgtattagcaggcatggaaactacattaatcttgtacatctccatcagagctcttaggtacgaggtacattgtcaacaagtggaatatttttattttttttattgttattgttttgagacagcctggtctggaatgcactggcatgactgcagctcaaattatcctcctactccagccttcccagtagctgggactacaggcacatgccactaggctgggctatttttgtatttttagtagagacacaatttcaccgtgttgcccaggctggtcttgaacttgtggtgaatcaatctgcccaaatcagcctcccacagtgccacaattacaggtgtgagccaccacactggaccaagcagaatatttttaaaggaatacaaattttttcccaacagtaggtctcgacagtgggcataaattattcagtaaatcatgccataaatagacgtggtctcatccagggtttgttattccatttatagagcacagggagagtaggtttagcataattcttaaggaccctaggattttgggaatggtaaatgagcttggcttcaacttgaagtcaccagcagggaagagagtcagcctgtgcttcgcagctttgaagccaggcattgccttctcctccctagctctcaaagtcctagacagcatcttcttccaacagaaagctgttttgtctacattgaaaatctgttagtgtagccaccttagtggtcttatctagatcttctggaaaacttgctgcagcttctgcatcagcacttgctgcttcatgttgcacttttttgttatggagacggctttcttccttaaacctcatgaaccgacctctgctagcttccaagttttcttctgcagcttcctcacccctctcagccttcacacaattatagagagtgagggccttgctctggattagattttggcttcagggaatgttgtggctggtttgatcctgtatccaaaccactcaaacattcttcatatgggtgataacgctgttttggtttctatcatttgtgtgttcactagaatagcacttttaatttccttcaagaactttttctttgcattcacaacttgcctgtttggcacgagatctggctttcagcctatgtcagttttcgacatggctttctcgttaagcttaatcacttctagcttttgatttaaagtgagagacatgcaactctgactttctcttgggcactgaaaagccattgaagggttgtaagtttgcctaatttcaatactgttgtgtctcaggtaatagggaggcccaaggagggggaaagagaaggagaacagcaggttgctggagccagtgtggtattcataaatataacatttatcaattaagtttgccatctgatatgggtgcagtttgtggtgccccaaaaaatgacaatggggacatcaaagatcactgatcacagatcaccaaaactgatataataataatttaaaagcttgaaatattgtaagaattatcaaaatgtgatacagagacatgaagtgagcaggtaccattggaaaaatggtgccgatagtcttccttaatgcaaagttgccagaaaccttcgatttgtaaaaaacacagtatttgcaaagtgcaataaaaggaaatgcaataaaatgaggtatgccgataatacatacagctcagtgaagaatatcttaaaaatatttaaaaagaaggaagaaaatcactcataattctgctgcccatggcaaccacaattaacccatgcctgccttccagtctttttaccacgtgttgtgttgtgtggtgtttgtcccacatagagatcattgccatacgsccatttggcacattgcttatttttccctgtctttatacatttcatcatgttgttctaaatgcttcttaactgcaattcttagtggttgtgatagtccacagaggggaagcattgctgtttatttatccatttctatgttgttggtcatttatatggttttaaatacttttggtgtcataaggagtgttgtgataaacatctctgtgcataaagcagtttctatagttcccattatgtctttaggatagattcccagaaatggaattactaggtcaaaggttgggcacattttttaaaggtttgtgagacatattgccaaattgctctccaaaaggtttgtagcaatttaaatgatcagaagcagcactgaagtccagtttcgtctaaccagtattgagtgctcattaaaaaaaaaaaaaatcattactaatatgataaacaaacaaatggtgtgttattgttgggttgaaagaagcaaatttggagaatccagagaaacacagcggaaattcaatttatgggctacattaacccagcattttggattggagggtttctaaagaggtttcgttatattaatggrtgacaagtggatacttaagaaaaagtgtattttggagaaagttgcaataatacctactagagattgtgtcctccctcaaaatcggagtgccatccgcgctccatgagtctgacactttgtaggtgctttataaatatggattgaagcaaatgagtgacgttcatatgatgttttgcagttttttcaaagtgggttttacattgagaatctcatttttccaacaaggcaactaaggcatggattcaataatgtgccagcggcacacacatagcaaatggtccagccacgaagagaacgggactgtccagccgggaggacagtatgcttttcacctccctctgtacccttctctgagaactgtttggtttgaatcatgatggcagtggctggcttctccacgatgctgttgtgctgaaccctattaacctcatagggaagacactaggatcaagaggccagagaagagacccagagccagcaaacaagacatagggttttattaggggtttacctacaaaggagagagtttagtggcagtgggctgggcaggagaactgccttatgtacagaaatggttcaggggccgtggaatggacaagactccactttcctacagtccagtgtcagtggctggacaacataaccacacagcccagtggccgtggcctgggcagggaaaccgcaactgcctgcaggaagagtgcagtttatttagataacattttcacttaacaycctgccrttaatgacctccacctggcaacctttatttaatccaaaactcagggactggattttccatacggcctgtgaggccagggggctcagttgttcctcatagacagggaatgtatctcctgattggccactcccagattccctagctaggaacagacattcaggtacatatacccttcagagagtcattctcaaggtatgctcaagctattgctgtcaggcgcatttaccctacagagctgaactaccatttcctcaaaagtaggtacagatggggtaacagtgggcaatgtggccctttctgcacttccacagtacccgaagtttaggcgcccctcctgccaagagcccccattagcagcaaaatatatctcacatggtgcccagagcaaaggaccctgtgctagttttttgtggctgctgtaataacggcaaactgagtgacgtaaaacagcagagatacatttgctcacggtgttggagcccagacgtctgaaattgacactgcttctggggacactagaggagactttgttcttcgcccttcccggcttcaggtcgcggtaagcattccttaactggtggtcacattactctatctgtgcctccatggtcacttggacttcccttctgtctgtctgaaatttccctctgcgtttattttttgttgttgtttgtttctgagacacagtctcactctgttgccccggctggagtgcagtggcatgatcttggctcactgcatcctccatctcccaggcttaagtaattctcctgccgcagcctcctgagtagatgggattacaggcgtgcgccaccatgcccggtcaatttttgtatttttagtagagacgaggtttcaccatgttggccaggctggtttcgaactcgtgacctcaggtgatccacctgccttggcctcccaaagtgctgggattacaggcgtgagtcaccatgcctggctatctgcgtttcttctgtaaggatacttgtctttaaatgtaggacccacttggaatatccagaactatcgtatcaaaaaatgtttactcacacctgcgtataccctgtttccaaatagagtcacagttacaggttccggggagttgacatgggtatcctctggggcagggggcacttttctgcctaccacagatactgaggtgcattgctaattacatgagtacagcatttgtgaaaactcgctcatgatatcttctccatagtcgcagtcagtaccagctgctgtggaaaaaattttacgcattgtgtttacaacagaatatataacatggcttagagacaaagtgttttacttatggccagtagatggaattctaaggtccgatgtcggtttgccatgacttgggcattggtttctgttcggctctgtttacggggctgtgggatgggtacatagacactcgtctacttgaacttccagggactcgggaggcctgcagttgaataacaagagaccgtgctggtgagaggtggagtttgcagtaggatttcaaagactccatggagtccaaaaggtgggaggtgtgttttggggcatgcgccaagggaagctgggctttgggaagagaaaagaatccgaactggtggcttcccacaattgctgggagtctgagatagattcaattgggaaaactaggttagtgccagataaggtccattactctttaaaagtggccactcatccctaataataaataaaccaaacattgggatattaaaacaattygttctcagcatcagaaaagaggtcgtgtgtgtgtttgtgtttttttaatatcccatccagcccccagccccagtaaccctaagattgaacaaaaccctacttacgtgctwcggatttaatatagcgtcaggctcctctaggtacaataaaataccaagttaagagyattaattccttacaaccctgatgggtcccagctgtgcacacgcatgtagggtgtgagggtgtgtgctcagcgggcacaggtgctgacggggctgttccacctcggagcgcgtgggccgggaacacagctgtttctcaaatcatccgccacttgcttctaaacctctgtgaagttgtaccgcctctgggcacaattaaaagctgtatactacatttcatcaggtagtgttagaaatttaggctgagccaaaaaagaaaagggaggaggtgggagggaggaagcaacgagtcccttgttcaggcggyattaacccccttaccctggctattggaacaatagcgcttctaaaagccgcacaaaatcctccaatattaagaacggagaaaaggagtgtggaaaaggtgtgggcaagcacggcatctcttctttctttttcttctttttctgtttctttccttctcttgctatttcctttctttctttttccttcccttccttccttccttctctctatccttcctttttgtcccttccttcccctcattctttctttccctctctctttctccgtctttctttcctccctcccatactctctacttttcttcttcccttccctttgttttcacgctaattccttaatttgtttttgggtctgctcgcaggaaataaccgtaagctaggataactgaggtaaaatttgtacagctaagctgaatggtgaaaggcccagatttagttctcattgtaggaaaaagggccagaataccttgcccatttttgccttgggaagtgagctcaatgaaatacatcttcatatgcccrttttacagaagcagcaactgagggctgttgtactgaggcttgcaatggccacctcaacttttaggtctctgaggcagcaatgggacccttgccggggcctcgccatccacatggtcattgcctcaaaatttgggattccagttgcccttttccttcttctctcttgaacaatgtgaacgcaakgtgaggatgggccttctccgccttcaaaagttgctgccttccaaggggaaaaggtctggtcttgtaatttctggtctgtgcgtgctgtataaggaagaaggtttgggtagggaagcaacagastacccactagtgagagggaggacaccgctggtctgtgctcaacagccaggccagcaccacatgaataaagcatgatggcaattgcctgactctgtcctcggtggggacaggagagctgagcataaggatctaagtttagacgccctcctaggattaccaacgtaggcrtgatcaggcccataaaatactgcacatcttggcatcttacctataaaaataatgcagatacattcgtaactccccaggttttcgggagtggaaatgagggcagytggggagtgaatctgtcgtttgttgagrctctttttcctgcttgccagacactgatctaggctcattcatacaccagttcattcatcctcataacagttctgtgcctgagtagattcttgtccttatgtaaggattaaggacgttgagacccagargggtctcatctaacaggcagtagtagagccagcagtcaaaatagtttgaccccaaggctccaggctttttccctatttctttctcacccacagccaattgcaatctggaccctttacctgtcagctgtaggaacatgaaataatgtgagtggggtgaaataatgccatttaaaagcaggcacattataaagaattatgtcaacctgatttcttgaatcccaggacaattcatatccccgtgccatccgattagtgaatcaagagaaactgattgatatacagcaacaatagttaagaaacaggcagcatcgatggaggtttgattaaaccgataccctgggtctcctgctgtatcaaatcatgggcgaattggtaccattaggataaattactacaagaggcactgcaaagccaagctaaataaactctgccttctcgagcccctgattgtcttattaaataatttctttgcctcttaagtgtggactcggagcactcgtgctctgaaagccctcctgattaactatagccttggcctcaagttgattttataaacttcggatggtgccccagagggtgaagcttcctgttgtcaattctgcccgttgctatagataccaaactccacaatcagtaattagagcgtgccccctgccccagaactggtcaaacggtgcagagcgctcggcaaatggtcttaaaagcrtccgcgcttgcatggaaatgcatttccaatggtgacggggtttgttttattcatggactttttgaaaaaaaaatcactggtttattggaaaccatagagaagtataagtaattattatgctttttaaaatacaaccgaggttcctcatcatgatacgttaagggaaaggaagacagggcaggagggtggtgtggcacaaaggcggctctgtctgacctgtcacgttaggactgagttcattcttgttcagattcagcatcttttgttacacccgaagtgcattccatggccctgtcccagccatagaaagaaatgcctttatttttaagcgagacttcttgtggaatgatgaatatgttcagggaggctgttggtggcaagaaaagaagggtgatgggttgggcttatattgtttagtggagcaaaagagatgtgaaacatttgtgtcttaaagtgttttggtcargagaaactaaattggttagaaagtgtgcaattttgcaagctttataaaaatataaaccaatgagtctggactctgttccctaaaggggatgaggaatgaaaatgaaggtttgcaaagacatcttgccagacccttacatattttaatttaaggtggtattactgtcctcattttcargctgaagaaccaagctctgagagagttaatgattttctccagatcattcacattcatttctgttacacagctgggattataatccatgcctgtctgactctgaaacctattttcccatttttttttttttttagggataaatttctcccaaactatatgcagatcctgctagagactgcccatccctctatccatttctcagtttgaaaagaaatcctggaattcagaatgatgaatattcattttaacatcatcttaaaatgtccttatagatgtatattacagctgtagtctgccaggccaagaattcgattggcatttccagagtactgttgattgtattttagaatcttccaaacctccgtaattgtcttgttgatttcaaacaccctgagaacatttcctaaatgctcatagcgtccaatagcatgggaaagtaaatggtttatgaggagaatttgggatgtgcaaaataagcctttgaagagagtgcattatctgaagcctgacattgtaacagcttcttaattacgctttctttcatgtggcatttttatgggatccagtacgcccaggctcaaatgatagacatttcaactcctacatccaagtgtagggagtcccaactttttgaatccatccgtgtggcaaatgtagctggacccttgggatgaagacccttcctgcatcctcccaaggagacaagttctggrccataactctagagcaaccccaacccccaggccatggaccaagtgtcaacaatgttgacattgtgaatccctgatctggaggaacatagctttggggcagtgccaggatttaatatgggttctttggacttcagagccccttgtgctaaattgaaacattatggtgttgctttgagcaaacaattagcatttttgccatagctttttacttctccatgttgaaattatcaaagattatcgtcgaaggcgtggtttctttactatctgtcttctccaggagactgtcatctctgtgagtgcaggaatccggctggtggtgtttttactctaacacctctttcagtacatacatacagtaggtgcttagtagatgtttactgaatgaatggataaacatgtacaaaattatgatmccttgtgttaaatatggtagggaagcaacataatgtgccctggagtttcacagaagaaggggctttcttccagcttggggatggaggtgagctgtcattctggatgatgtgatggggaaagaggatgtgagctgaggcttggaaccaagcagagcttgggctttggggtgctgggaggacagaatgctggaaacagaggtaagaagggtaagcacctagtcaacatgagtgatttagctttgggagctgatcaagtgatatgatttggctctgtgtcccaactcaaatgtcatctcgaattgtaatccccacgtgtcaaaggagggaccaggtggaggtaatttgatcatgggggtggttttccccatgctgttctcatgctagtgagtgagttgtcatgagatctgatggctttgtaagtgtttggtagttcgttctgtgttcattctccctcctgccgccttgtgaagaaggttcttgcttccccttcgtcttctgccatggtggtaagtttcctgaggcctccccagtcatgtgaaacggtgagtcaattaaacctctttcctttataaactacccagtctcaggtatttctgtgtagcagtgtaagaacagactaatacagcaagggagcagtgatggagcacaggctggaaaactgagttgaggggtcagtggtggaccctgaaggttagactaagaaatttagactccagcctacataaatgtagactccatgcagaatgactggatgtcctataggacatgcaaagccacagggaattttggaacaggaaattgtgctcaaagctgaattttgaggaggtaaatacagcctctgtgtgtaagacagagaaaaggagagagtgggaagtaatttatgtatcacagttgcctagagaagacagaaaataggtgcctggcttatgtggccactgctttttttttaaacttatttctttaattttatttttttttaaattaggattaaaaaatgtacatatacacataaaatatttatttttgaataggtaatacttttatatggttcaaaaatcaaaagtagaagataaaaacaaggtgtatatgtatatatatttatatacctatgtgcatatataaaatccttgtatacatatacacacacacacctatgtttttctttatgtgtgttaaaatctccctctacccctttcctttagcacctaattcctcttctgaaccgatgttatttcctggtgcatccttctagacattattatgcatttacaaggcaatatgtttgtatattcttctgccctccccttcactttgctatacacaccttgctctttttgcttgacaatatatcttagagatggttctaaatcagcatataaattatttcttcattttttaacaactgctgagtattacactgtgtggatgtttcataattcattgaaccaattccctattgatagacatttgggttgttcccagccttttgctattgcaaattgtgccgcaacgtgtaaccttgcaccgacatcgcttcccacgtgcatgcatgtatttgcaggattgagtcttagaaatmgcagcatcggctgagagagtatgcactccggtcgttttcatagatattgccaaattgccctctacggaggttgttctgatttacattcccactaagcaacatacgacagttagggtggcatttcctgactccatgctttgtagctgggtggaggggtggactgagagtacatgtggatgggaaggtgcaagtgaatgctctcaaaatgtgctttaaggagaaatattttgttgggacacagaagttagactgcaagaaggagaagattggattcagggcaggaaatcagtacaacttgcagtagtccacrtgacagttacgcaaaggcctggtctgatagaggaacaagagagagagaaagtgcatggcaaagacccatcattgatgagtgactggatgtgaggaatggagcaggggagatgctgatgatttggttacccscttctccatcccccaccacccactgatgttattatccagtaaggaccaggagagaagaagagatttaagaagaagacaatggctgtggtttgatgaagataaaacgccctgccagaatcatttgagcaaaagcttaatgttgtttgtggcaatgtcacttactcctgatcccattggagaaatctttcctatcacttccaatccacgtgtgttcagacaaacactaattttgttagtacaacgtcccctaatagctaagagttaaaaaaaaaataggtcttagaagtgtgaaaaacaaaaaacaaaaaacaaaaaaaaaaacactaaaccccaaatttgtccttttaacactttcagcaaccctgtaaagtcattatcatccccctgttacaggtaagaaaattaaggctcagagaggttaaataacttggccaaggtcacacagctattaaggaatggtaccatgtcttggacccaggttaactttaaatcctgagctttataacggtttgatttcagtagcaaatgcagtggcacagaagggtctgggcatttatttccaaagaatgatttcactcaactgaggaattctaatgttttaacagcatcctacttatttctaaagtgttggggtgaatttgccaaggtttgaaaagtgcatttgtaagccagtaggattcaatctgaagtcagggataacagagccgggggcggaggctaggtctccttacatattttgttcacaatgggactagaacactctgcagagtatgaaggttgtgattcagttgcccaagcagtaaggcctgactggtgtcacgatcccacaacccgcacaaaggcgccattgttgcccagtgtgaagggagctgaggcatcaccaaagggggccaagcgtcccttctctgggttagaaatgttgttttccatttgctggtaaacaacagtccaagttcattgtcctgacacagaactctgtttcttcttttatgctgagagtttgcaagtatggatcttgataggaatgcttgcaaacaacggtagttataaaatgttgcctcctgtatctcagtaggcactgttcaagcatttgaacttcatcaagtatcaagacaagtctaagagaaggtggggagagaccatcaggrcctaggattgsaaaacctccaacgcaaaatagagatgtagttttagcgtgctgcccaatattaaaagattgtataaatgaggggggcacacttcctgatatgttcgttatgcacatagtcacacacctctcagtgccttaaaatttgttatgatgcagtctatctcgtatggaacgatcttgatgtatctatcaaacacgggagaaaaaccacttaaaatgtgtaaaaagtttattaataaaggagtacatgattgtgttttaaaagctacatacattaggtttaagctgcagaaaatggcggtttattccgaaagactgctgtatttatgcttaaataattaggattacctctacctggtatatttgcagggacaagcaaagcatacactgaaaataaattctcaaatgaaattcatttcacattagttgcatcccaacattcctttatggactgcattccatgcctggcactgtgcctatgatttattaaaatctaaagccattaataaataaattattcaatccatgcattgaattatctagctcwttcaaagacagtcacagtccatccctcaaagagctcatggaccagtcgaaggagggtgacagcctgggtcaaattggtgctgagcacacaggcaggggtcaggctccctggagtgaagtgtaagcgtcgctgttcactggctgagtcatctttggtaggtccctttaccactttgccactttaagtctccgtttcctcatctgtaaaatagaggtaataaaaacagctaatatttacagagagcttactccttgttagcagttttcattaattaatgggtgtatttattggaataaccgtgtaaggttgccatttttatttccatctgtgtgttacagatgagatgtgtaatagaaagggaatttgcccaagctcacagtcacaggctggtggagttgggatttcaaacccagagtgtctgattcctgaacctgtgctcttgtctcttccttcagtaccacatacaacagaggggacaaaataatttctatataaagtgcttagcatagtgcctgccacttagacctcaaaatatattgttttcattggataattaaatataaaataacatacagcatgatgrttaatacaactaataaatagtgcattagtattataggcacaaaagacagtatgaagtacagcacagatcatgaggagggtagggtcagttctacrtaaaaacagggttagtaaaggcctcagagagaagatgtcctttgagctgagtcttgagactccagagatcaggactcaaggactgtggaacctgtacattcacrtcctggtaatcttacattgctcagaagactccagggacattgaggttgcccccatggagttgaaactcctatgctgatcacttaggaagccaagaacaaattaacccagggcaacaagaaacaatgactaattagaccctaatgaagtgctgcggtactggcgtccttccagatttgacttgtaatcgmcacaatgtattacagatgcagagtcttcatcttgttgggctgtgatcaagtacatatgctccccagcagttctttgagatttccatgttctccgcacagtgcggagctactgcrggtgtgtgagccaagggggccctgtgacccttgaaatagaaaagggggaaatggctgcatgccarccgaagagaccactgcattgttggccataartgaaactagtgagatgtgtgggatatcataaaaagaacattgacataatccttttttggatgaagttatatcacaaccagaacacacaatgaccagcaggcttctctttttttgtttgatttcactcctgaaaagtgggctttctgtgagagttggacagactccatgctgcccctgcctcccgggccttccttcccaagcagggatgagctctcctctgcatgtaacaagcaaggtgattcagcaagaagactgctggtctctcccttcctccagggccatttgtgagagtgagacacaaaatattagaagcaaaagaagaagctgtactcccaagaggcatggatccttgagtgagttatgtgcttggaaaaaattagtttgcacatgaggacacaaagagagcctgaaaagcaggaggctttgaggtctttttttccctcctgattcggagggaaaaaaaatgttgtttgtgttcatttatggaaattagatctatcacatactcttakgcaatttatgaaatgttaagcaatacccctgaatgtcctagtcccaggaaagttgagagttgagtgcaagacggggacacccaggagccagtaaatcaactcttgaatgatggtgtattaagtgataaccttgtcatagttaaagtcacactggaaggatatatattgaggctttatctctgccatggtgtcagcatcagtgaattaacacagggtgtcttaacttttcaaaaacaggrcatgggtgatcaagcagcagtatatctctttactccttgtattagtccattttcacactgcttgataaaaacataccstagcctgggaagaaaaatcggtttaatggacttacagttccatattgctggggaagccttacaatcatggtggaaggcaaggaggagcaagtcacgtcttacacggatggcagcaggcaaagagagtgagcttgttcagggaaacccctgtttttaaaaccatcagatctcacgagacttattcactatcatgagaatagtacaggaaagacccacccccatgattcagttgtctccctccaggtcccttccataacacatgggaattatgggagatacaagatgagatttgggtggggacacagagtcaaaccgtatcactctcccacccaacacttgcagaaacacacacacacacacacacacacacaccccttcctacgtcctacatccctgtacttggaaagcaatcatatttaaatcattgctgctggaactttagttgactttataagttacattttacataaaaaggcagcagtggtgaagctggaagagggcacctagrctttgatttcaggcaagattttgttaggtcccagtattggracttccggttggtggattttgctcaagaatagttttctctttgtctaacgcttcatgagagacaacctaaataaagccacagccagtgttacagaaatagtgtttcgtgattaaaataatggtacttatttgggagagttacttgccacgtttcagatgattkggaggtagtcttttcaggaatattctgagtttgtttcttgatctcgatagcagcaacctttccatttgctctctgtctggtttctctgtgtctctctttttccctcaaacatcgcttttctttttttaaaacaagaataaatcccttaggaccttgctaagttattacttatattgtcgcttaaaaaaaactttggaaagaggctctggcatactttaaaaaagttaagcacactcaagcctctttaattctaaattcagttttgaatatgcttgtactgatgtcaatgacttttcaaaagagagtgtcccaattatttaggtggccaagagaaacagctttaattctttatcacataaatatgcttcaaaccacgatttaaaccagatggatggagcactggattagtggtggggcttcttggctgatctgagtttcgcctcctcgatcttgcctgggtctgttctgtcacttggatcttaccagtcctggcaggcacacagctctgtgagattttccttctggctttgcatgaagcttttgaaaagaaaacacatacatgcaagtgacctttctagggttgtttctagtttcttcgtcttacataaagcccctgctaatttagcatggtgtgtgcccgagtttattttctttttaacaactttatttatgtaattaagcgagtgaagtcatacattttattgatctaatgaaacgcatttcatggttcctcctgcccttcatcttctgaccttccccttcagatcacagccctttactttcgtcaatgagacgccacttaacaattttccaccttgccaaatttgaggtccccctcaacattaacggggaacccaatatcagttccttaaatgggagcaaagattgatgtcaatataaactaggacacacattcatattgcagaaagggtaagaaatccttacacagaacgagtacggtctctaacagtaaagtacagaacaggtggttctcattttagtatatttaaacttcaggtccttaaatgttcttttctttttccttcattctgtttctttattattttaatggagtgcaaggtgcagtctttttgaagatgtagaatgtggccttataaaagctaagtgctactttatatttctrctgtccttgccsgtggcctgcactggggagttgtatattgtatcagtaattttaaaagccagcaagtgttctaccagctgaagaagttttcctaatggtggctggtcaaacgtattacttaactaggcgtatagaattgaggggaaatgcaggatgtaatgaaatgacattggtcaatcctcagtaaatgtttttttcaaaggcttggcacaaaaaatgtgcaaaatcttggaggtagatttttttgggggcatttgtcagggaagagattaatataatactcagtgaattcaggcaagtcctcaagaagaaaaatttaaggagcaaatatgtgagccaggatctcatgctggactatctaagcaagcatgtaggaagagtttgtttcttcctgctrtggccatagaggtttggttgtcactatgaagaatgggcctgtgtttttttttaaaaatatgctgatctgggtgaggtcacattttgctattctcagtggagggaataattgggattatcttatgatttttttttctctttaattttcttacaaaggaaaaagaaagaatccaatttgttataaataactgctgagggcagtacatgttgcaggtagtcactatctgggactggtggcacaggcagtaaaggattcaccaagacagttgtaggtaaagaaaggtggatttattggagaagataagaaagtacactgtaaggttgcaacaggcagcccagcatggaaggggctgtctgcaaagaggcaggggctggagggactgaagttatacagggtcctgttggagggagctatgtgcagaatgaggtcgaggtcattgtgcctgcggattgtttgttgttcttccctacccggggcccactcctacctggggcctcttcctcattgctgcttacttattagaactccacagtagattttttataaatgcagacacatacagacacccacacccacacatacagacacacacagaaacatatacacatttaggtcgcgatttcttcacaaggacattcttatagacatgtcatgaagggacttggggctcagagaaatgaagtaactcagctaagtctgtacagtacttagccaggggatttagaaatccacccagggatggctccagttgcmtgtttcttttcatttgacacgggatggcctaatgggtccccaccaggggtggcttggaaaggagaaagcaactgcattcccactggaaggtgttctgtagcaaagtggagtgaatgccaccaataatgagttccaaacagggtatgtgtttgcagacaggagctacatacatttgaaaattaggatgatttgaaattgaaatgagggcttatgctgttcattggattaatttttctctcttataaataaaaaatatatacaaataatacataaacattgtttttcactgtggcttgaattttctaacaatttttttcttcttctcaggaaatgttttcttcttatacctccaaaataaccactgttgacagtgtattgttaaccttgctagaaaaaaatatttatttttgatccatacacgtaaatatgcatactcataaatatgcattcatattttgtgtatgagtacacttgttaatttacatgtatgtcttgatttatatacattgttctatacctttccttttcccataattttatggattacatttattttcatttctgtatatttagttaattcttttaaaaggctgcctgttatcccattgtctgtcttcaccatcatttacttaygtaataaatctgttaaataattttaatataaatctattcatctatccatctattaaaagagatttaagttatttctaatctttgcrtattataagttgcatttcagcttataccttgactttctttgacatatacatcaataggtagagtatattcctagaaattcaattgtggaccaatgagatgtacttcaaatttttaacagatatttcagtattgacctcccaaaatgtattcacacacccaccaaatctaagtgtctgtgtaacacacagatgctgatttggagtattaccattttaaaaaaataatatagctatcagtcgtgtaaaaaaaatcctcaccattatttcttaattttacattgtaattgtgagtgatgttgggtagatttttgtacttttattgaccattcacatttcttcttttctgaactgcctttccatattctcggtccagctttctataagattgctctcatttactggtgakagctctgtgtaaattaaggaaaccatcaccaccttcgaatggctgactattgtaaatattttaatgtttgtcgtttgtttgcaaccttgtaattttttcctgtgcagcaattttaactttctatattcaaatatactctgaatgcacagtgartttggcagaataccatttaagtcttgtattttccaaagytagtcaacrtccaactgccaatgttgcctgaacaggaaatatttatacctgaaagcgtccaggtgagagtcaggaaagccatgaaggtgcaactggcatactgatgtcacttcttctttttttttttttttaagacggagtcttgctcttttgccaggctggagtgcagtggtgcaatctcggctcactgcaacatttgactccctggttcaagcgattctcctgcctccgcctcccaagtagctgggattacaggcatgcaccatcacacccagctaatttttgtatttttagtagagacgggattttaccatgttggccaggatggtcttgatctcctgacctcatgatccacccgcctcggcctcccaaagtgctgggattacaggcgtgagctaccatgcctggccctgatgtcacttcttaggctaatttctgtgaaattgtgattgggaggaaaaagtgaacaggaacttaaagccagcagaggaaagctacctgcccttsactggtggtcagtgcatggattccagagacagggtgggcaccagttcctcaccgggtcctttctagttgcatgacctggggcaggtgactttatgtggctaagcctcagcttcctgacatatggcaggagtaataatatcccttgaagccaacaaaattcaataggcacatgccatgtacatgcctgtgttatgccgggaacttcttaacatttccagaatatgtgtaatcatatttgttacatgcaatatgaaattatgtgtaaactgtccaacctgcaggaggcagtagatcaatcaattacatgtgattaatcctccccctatcttacagagaataggagagaaaatagagctccaaggtggaggaaaagacaactgagaggaggctattgtgatgttttattaccataaactgccaagggttagycgtagccctccatctgccagctaattccggtttcattaatatgaatattctcacgcttccagaaggaaattcttggaatgttatggatctctgtagcaggcacatgcaacgtccagtgcttccctgctggtaatgtggcggttttattatgcatgccatacccatgctctctatttcctcgatagrccttatagaaatcaccatgcttccttttagaagaaaatgatggtatcacatggagaacgagctgaggagcttgacaatcttggcaaggcttatcaaaagaaaattcatgtgttagccttaagttaacactacttttattaaattcagtttttatcacagctgataacttggagatgtaagcatttagagacagaattcacttatgaatgttctaaaatgtcagaaagtttaggattctcttcaggtagtttcctttctctcacttggagtgacatgttggacccgtggcattgtcccgaggcaacgttgtggaatttttagagagtgtttgtctgttagctgtttgttttgaacatgttcacctttggctctgacctgccatcatggaaaaaaagtgtcaatgtgttgggaaagaaatgggctgcttctcttttctcctccctcctccgtctccttcccccgaccctcctccatccccttcctgcccccactcctcctgctctccagcctggcctctgtcccctctgtgttcctccccttcttccttgtatccttaatgacttccaggtgtgcctgctgggtcaggcttctggccccgtcctggggaggctgggtctgtgcctccacaaacacaagaccaaagttagggggtgggggactccagaagtacaacatcagaggaagaaaaaaaaaactttgaagttttgaggatgaaattggtaaaaataattctagatgaagatagacccgtttacattccaaggaagggaaatgttttacccaaactgtttccatggaccctgtgggttcttgttaatrctgttcaaccttgtgattgaaagcccaagccctgtgatccacagcaggggccacagccagaaataattccccgagaatactgcgtgtgccttcaaatggtccttgatcrtttttcttggatgccccactttccaaaggccagaaattgtttcagggagtcattccagttggggaaggttttatgttctaagagcaaggtgctgtactcataggaaaatgtgtaattcgtcatgatccttttgtgtggagaggatggcggtggtccacttctcaacttgggagtcccttagtgactcatgatgtatccttcagtacgctgcccagtgccttccccatttgacttagattttctgccacagtttaagtatcacctcctctatgaagtcttgccagacacattcctcgtctctttcctgttggaacaactgcctcactcctgtggccccactgtgccatagacaggttagagaacatgggccctggcatcagacctggcaggcagtcttgattaggcccsttattagggtgctctgggcaagtaagtttacctgtgccagggatgcacctttttaacccaacacttagaggggtcctccatgtacagccatgatcacaactctctaacgtggtcacttgcttgcacacacttgtttagatgtctctgccctgctgttaattagactgtgagcctccagagggtgagactgacatctcatttctctttkcagtcacagcagagatgcaggcccacagtagggactcaccagatgtggcagggtgagggaattgtccatagatgccttaaagatatgctatccacaggagcagagagcacagcaggctggatgccaaggagaattcgaccagggtaaggcttacaggcaatccattcagtgcagagtcttcccccatccacacatataactccctttagtattgatgacctttctctcctgaaatattacagaaactgccctgaacgaagatagatggtcccccctcagcgttcacacatggttccgtctcatccaccagcttccccggccccattccctctgtctcaggaaagtaataatagtaactcataataatagttcaaaataataataatcatacctgggatttatatttcagcgtgcctcctaagagggcaaataaaccattttacacaatgcagagagaaggacagattttctttgtgctgctgctgatcacgttaagccaggagagatttacagtcaaattccagctacagaagcaaagtgttggtgccccgttggcatgtggggatccactttaatgttgttctcttggttttgcttaaactgccaagtgaattactgtaacacactttgcctgcagttaatttgacatctagtgccagagagctgctttatatttttcaaggcaagccagggtgaaatttttgcaaaaagatttgtccatcatttttactgatgtccaaacacgatgtctttagcttctttggaatcgagctgtggaagtcacgtgggctttttcttttttcttttctttttctttctttctttcttttctttttttaaggatcacagaagaaaagcaggccgatcttgttgaaatgtttttaaaatctccaaataataaaataggtttagggtgtttgcttatgaaagctgactttcaccagaatgatttatatgcatcatgggcagaggggcagtccaataaaagaggcagaaagggctcttgaaaaatgtccctgggcacttgcccgaatgactttagtgacagtatctactaaaactgataytaattctgttacgtgttatggcgcatacccaagaccctccccataaactatttgaaagaagcaaagttgtaattctccaaatacggacttgtacatttctgatcattttagcaccaacattggttcaaactctggcagccgaccacagttccagctgagctttgctgcgctgtcagcaccatggggcctgataaagcatttttggatttttcctactcacagtgcccccatggtctcaatgctgttgagaacattaagctccttacctgtgttttgtggttgttgttattgtttttctttctggtaaaggactttatctgcagtcctaacaaattgacttacgttaacattctaactcgtggctaaaccaaaaataaacttgcagaccctgccctgaaatgcacgctctgagcagtctattggatgcggtggtgtggccgatttcttggacttgctacattcttaggcaagtgacatctcccttcatttgtacagagggagttagaattgaatcgaacttccaccgcagcatccgccagctcttataatcacttgccctttgctgatggtgagtttttagctgctttctctcctaccatacagcactgacacctgagaagtccagtccttttggagttcagtagattccttgtctctggaaaatcagcagaaaacaatgcagcctcctcttgatctcccctgaactttgcaaacctctctcagcattgaccgcatgaagggtgggtgccctgaggcaggcaagccaccaggtggtaattaagaagcaagaagcgctgctcccaattctctagatctggatttagaggccagttggcttcagaaaacatctcattcacacaaaatgggacatggtcttttgtctgttaaacataagctttcaaggtgagttgtgcagaggcaagtctgcttgtttcatcaagctgacgtttatacttctgagtaagtagggggatccggagagtcttcttgtcactcaaacagtttccgtacgtcagtttcacacctctgttctgcatgtctctgttgggaaggatgctgatgtctgggatttgaaatagagatggttggacctctgactttcaacaggaggaaatcaaaattaaaggaagaatataggcgtacgcttagaaaggacctgtgaaaggaagataaatcttgggcccccaaatcactaagctaaagggaaaagtcaagctgggaactgcttagggccaacctgcctcccattctactcgaagtcacccctctgttcactgagataaatacatatcggattgcctcctttggagaggctattcagaaactcaaaagaatgcaaacatttgtctcttatctacctatgacctggaagccccctcctcatttcaagtcttcctacctttgctctgagttgtcccacctttccagaccgaacgagtgttcatcttgcatatgttgattgatgkctcatgtctccctagaatgtgtacaaccaaactgtgctctgaccactttgggcatgtgtcatcaggccctcctgaggctgtgtcacaggtgcacatcctcaaccttggcaaaataaactttctaaattagctgagacctggctcagattttcagggttcacagacctgtcaacatgaactgtcagtggtgatagcacccgttttcaagtctcattttaatcggaaggaagttttaccagctctttggctttgtagaaggtcgagttctccaaatttaagagattcaaaaatgtcctccaaagaagtttggggtgaaaacacatgacagtttcttgttcatatttggccagaaggaagcagtgtccattaggttgactctccagtgcttcttggtgttgtgataagcccgtctagcayggagggccagaaggaagcagtgtccattaggatgactctccattgcttcttggtgttgtgataagcccgtctagcacggagggccagaaggaagcagtgtccattaggatgactcttcagtgcttcttggcgttgtgattagcccgtctaacagggcgggccagaaggaagcagtgtccgttagtatgactctccagtgcttcttggctattgtgataagcccgtctagcagggaggagatgtctacacggtgttctccaaactgctcagaaaagagcagtaaggacaggatggggcccagttaagaggtatatatcttaccttctctttttctccttcttctccatctcctgcccttacttcttcctgcctgtcatttatttattcttttcacagatatttagtgagtccttgctctgtgtcaggccacagtgtagatattccagggatggaggtgaccaagcagacatggccatagtgacaggctaaggaagcacaaatcacaaatacagaagataattcctggtagtgacgggtgcctccaagcatataaaacagggtagtgagatgggaagttagagtagaaatggctcaattttgtgctggaactggctgcaccagcaggagccaatgattacccatctcccatgtttagtgacatcatgttgatagcttgatttcagccatagtgagaatattttcaccacggaaattggcacatgctacacatcagggctccctcctccccaccaaagctgatcattaaacattttctagaacatacctggaaggcatctgggaagaggtaacattgatcttaattgttattagagagaattttcaatttcagttgtagcatgaaaaatcacagagtccatttatttctcctcttygagtcagtatatctcaaaacattttttcaacgttaatagaaatataagaagtgcctggatcagtttttgkttttgttttgtttctttttgagatagggtctcattccgttccctaggcgggactgcagtggcaccattatggtttactgcagccttgacctcccaggcccaactgatcctcctgcctcagtctcccaagtagctgggactacagggacacaccatcatgctgagctaatttttatatatatttttttacagagacaagttctcgccttattgcccaggctgatcttgaactcctgggctcaagccaccagcctgcctcagcctcccaaagagcagagattacaggcgtgagctaccacacccagccatttatctgttttttaaatagcattttggagatgacagaaaaaaaaataaaggaaagagaacgctcatagaagtttaaggttcagaagtatttggctttgaaaaaaaagtttaagggactgtttgtcatggggtctggtcttccaaatttaatgcctcattccaggtagctgcagattttatagtttctctcaaagaatgtcaatcctattgtctttccctgcttccccctcctggatgaagtctttctctacactcttttttgggaagttcccaaatctgtcagtatatattacaaaaactgttaccgcctaacacattaaatgtatttaaattatttgttctattaaaatgtcagtgtmtttcttgaattttaactgtgcctgaagatcartcattgtaacagctgcagggaaggctttatgacttacctgaacggtggtgtattctgtggctcggctaagtggattcttcgactttaatagattttactagctaggacaaaccatttgagtggcttctgttggagttttattcttgatacataccaatgatttactcagatccgttagaaaaaatagttttagggatgataaaaattatgataataatattgacaataaatagagtattcgccaatatgtatagagtgcccattatgtttcacaccctatgtcttgtgtgtggtgactcatttgaaccttatagcagccctgagggataggtgccggtttgtctctatgcgcccatgggaaactggggcacagaggtgttaagtaagtgacccaagaacacacagctggtaggagttttagccaatattccagtctcgatctgctgatatgaagccgatgcagctagccaccatgttatacccacccatagtcatgaaaataagatgagcttaatttttttcttttgagactgggtcttgctatgttaccctgggtggagtgcagtggcacagtcatagctcactgcaatcttgaactcctgggctccagtgattttcagcttactgagtagctgtgactacaggcacaggcctccatacccagctaagtttattattttttggtagagatggagtattgctatgttgcccaggcttgtcttgaactcctggcctcaaagcgatcctcctgtctcagcctcccaaagtgtggagattacaggcatgagccactgcacacagccaaggtcagctttttcactycagcacaccaggattttcatcccagctctccaatcccccagctgtgtgggcctggtcaacctgtttagcctgtcaagacttcagtcccttcaactgatagatgggagaaattaatagcacctgcctgagaaggccagctttttgggggacccaggagttacgaatgcccagcacttctcaggtgatagctgctgcttatctccttgtacagagagaactggaacattctgaagatgaaatgggataataatgtccatgaaaagacctggcttcacgcttgcctcctgctagttccttttctactctatttcagcttcctgtttgtaacatgatttaagcactaagctattgaattttggagtgcattaaaaaaaatatcgagtggaaaaaggaatatttcttagggaggaaaaaccckacttttgactttataatattaagttcgttcatatctctcttagattcttatataaattttattgacctaatgttctgtacagtagtccttawttacagttttggtttccaaggtttcagttatacattgtcamctgtggtacaaatatattacttacaataygatattttgagagagagagaccacatttatgtaacttttattacaatttattgttataattgttctattattgttgctcatctcttactgtgcctaatttataagtatactttattgtaggtatgtatgtataggaagaaatgaaatatatgtagggtttggaaccatctgaggctttaggcatctactgggggwcttggagtatatcccctgtgcagaagcggaggctactgtayatacatttgcctgtaagtgagcgcgttcttggattttgttgaatggtgccactgattatgggtcagagcttgttgaaagggtattaatccattatttactaaaactaattaaattttcatgtcatttctttacttattgtttttattctctatcagtgtaatttattacagcaaccaattaaagaacaattttatggttctatcagtgatgccaaaaaagcatttgctcaaattcagaagtcgtgataaagccaaccaaccaacgaaacagcaatacttgtaactaaaattgggagaaaggaaaacactttcagtagagtcaaggatttttttgttaattatttttatttttagagatggtctcactatgttgcccaggctggtctcgatctcctaggctcaagcagtcctcccatctcaacctcccaaagtgttgagattacagttatgagccaccgcatccagcccacaagtattattccaaactgtaaaatcgtgaaatgttttgcattagaatcagaaactagacaagaatattcatgatagctgtcaattgtcacattattttagaagttttaacaaatacagtaagacaaaaaaagtcttaagtaatgggatgaaaccaaaatgttctttgttttaaacttctgtaattataatcctagagaagctaaaatattcagtaaaaattactagcaatgaaataatttgaagagttggctagatgtaaggtaaatatacacaaattagctggtatatactagttataatttaagatggagatagaaaaaaaccccattcaaaatattaacacaactatcagatatttaagaataaatgtataagagtgatcaaatacctgtattaaaattatataatttattgaaaggaattttttgaaagtcacccataaaatgatataattttaccataaaatatcagctaaaaagggggcagtcagcaaaagctcagctgtgaattaagattattttctaacccttagttctttgataacataaataccggtagaacttggaatatttcaagtaaagtaacatgctgtgttttatctgtattcctggtaacttgcatttttcaaggaaggaagtgtatgatatgaagtaggcttataatttagtcagatgagctcttggattatgttaccttgaatataatgcagaggagaaaacaaaaagagtcttttgcatttttatttcttatcaataggtccctttttcttggaatgtcagcctgaccctgaaggtattctcctaccagcagagccttctttgatgccccgtcttcaacctgccatgttttcccatctstgaggcttctattttagagacttttcctccagaactggcttatatcatcctgtgttgctgcatccgatcacaggtctgtggctgacctgggcagcgtagtagaagggtcttgagatttggagtcgtaacgagttttcaaaactcataactatattacagtttgcgcaagtcatttaacctatctgaaccttcatttcctctcccacacaggataaaataaggataataacagccattttagagttcgtattaatatttaagtgggagaatgcagccagtaccctgagaattaaggttcattcactcagcaagtgcttactaagcatctggtttatattatgggaagttttgagaattaggtggtcagaaaggtgtggtcctcgccttcaaggagcttacattctaggaagcgaagactactgaacaagagattttagtgctaggattggagaccccagcagaagtagcaaatactgtgtgaggtttaaggaggttggaggcaccttcgcttgtacttctacatgtgtcccttcatgtctagttcactgattttttaattgaaattttaattgaagactcacatgtagttgtaagaaataatatacaatgattcctcatattcttagctcagtttcccccagtgatagcttttgcaaaacaattgtgcaatatcacagtgttgacacttacagaatctatggatcttattcagatttctcattttacctgtactcaagtgtgtatatgtgtgtctgtgtctacatatgtagttttatacagtgtcatcaaatgtgtagcttcctttatacacaactacatcaagacagtgaacagtgcatcaccacaaaattcccttgcgttgccttgcaaaccacacccaccttccttctgcgcctgcctcatccctgacccctggcaaccactaaactgttctccacttttaaaatgttgttttttcaaaattattatataagcagaatagcatagtatgtaatcttttggggactgacttttttcactcggtacaattccgtggagattcttcccagttgttgcacgtgtcggtagcttgtttaatttcattgctcagtagtattccatggtattgtacatataagtgatcgtatgtttaatcactctcccgctgaaggaaatctagtcttggctattgaaagtaatgctattataaacatttgtacacaagtgtttgtgtaaatagaagttttcttttctctgggataaatgcccatgaatgcaattggtgggttgtagggtaatgacatgattagtttgtataagaaactgtcaagctgtttccatgctattttacatttccaccagcatttggtgatctagtttcactatatcttcaccagcatttggtggtgttgcagttttttattttagccattctggtaaacatgtagtgatatttcactgtggttttaattaaattgccctgatagctaataattttaaacatattttcatttgtttgtcatctatatatcctcttcggtgaaatgtctattaatgtttttttctcattttctatttgaattgttgtattattgttgcattttgaaaattctttatatattctagttattggttctttgttggatatgtggtttgcaaatatcttctctcaatctacagcttgtcttttcatcatctttacatggacatttgcaaaataaaagtatttagttttaatgaggtccaatttatcaatttttcctttcatcaactgagcttttgttgccaaatctaataattctttgggtaaccatatatcccaaataatttctaatatttttttcctaaaagtcatatatttttgcattttgcatgtatgcccatgataaattttgagttaatttttgtataagatgtgaggttaaggtcaagtctaataaattttgcctaggaacatctcattgttttagcaccatttgctgaaaatgatcttcctccagagaatttttttacctttattcaaaatgaattgagcatgtttgtgtrggtatctttctggcttctttattccactgatctatgtgtctgtctctctgacaattatacgctgtcttcattactatagctatgtagtaagcctcatgycaggtagagtgattcttctcactgtattcttttttattaagattattttagcttcctaagacctgtgctttttcatataaattgtacaatatggttgtctatgtctaccagaagccttgctgcagttttaatggggtttaaatctataggtctaacattaaacctatagatcaattcgggagaattgacatctttactatgttgagtcttccagtttgtggacatggtatgtaattctatttatttagtataaacccactggagtgtgtacctaagcatttcattttctttggagcgattgtaaatggcattgtgtttttaattccaacttctacatatatctagaaatatgattgagttttgtgtgttgatcttgatcctatgascttgctgattgcatttattataaagttccaggagttttttatttttgtttgtatttgttagtttttttgagatttcttgggattttctatctagcctgtcatgtcatatgcaaatagagaattttatttcttcytttrtaatatgtgtgccctttttttattgccttattgtagtggctagaacttcctgtgctatgttgaacaagagtagtgagaacatccttgccttgctcctgatcttagggagggggaagttatttaccatttcaccactaaatttgatgctagctgtaaattttttgtagatgttctttatcaagttgaagtgattcttctcaattcctaaattactaagaaacttttgaaaatgataatgggtgtgtactttttatcaactgctttttgtatgccaatctatatgatcatawgattttcctttagctttttgrtatggtggactatattgattttaaatattgaaccagccttgaagacctggaataaatcccacttgstcatggcatatatgtttttttatacattgttggatacagtttgctaacattttgtggatagctcaccaacttttattcagaaaacatccgtctcagtttagtgcccaacaaggaaagcatactgtttgttgggtgggttccatttttgtggttaggagaagaatatagctcccttcctagggacggtctcaaatgagtccccatcagccaccagggagctcagctttagttgcataagaaccaatgagcatttagtttcatgtctcataaataatctgcctgcttatattttcatctgtacttctctcagctggcattctgccacagactacatttaggaccgcagccagtgggttacagcaggagaccagactccaagttctggcctcacgttgcttggtatacatcactcagttctgttggcatggatgctcctcctataccccatcagccatcttgcagwatgggtttggtggatcacacagggattcagataagagggttcagatccttctatccatcaacccacccatccacatcactgaaaaagggactctcagatgccgatgaccagtaagaccacatctgtgggcacaaaagagcccatttatgttttttatgggaacctaagaaggaaatgcttttctggtcaaatacgttcttctctgattaggcctctcattttaaggcagttgagaagactcacagatgtgattcactggcaatggctctggttcaccaagcttagctctgctcagtctacctttagcagaagattaaaaatgaaaactcttcttgttagaggtagaagagatcctttcccaaaccatagattcatggaactgtcaaagagcagcactgaactttgtactcaatgccttaatttttccagttgaggataattcacactaaacawgggatttcacctctctgactcatgcatcaggaacttggagataaagccctgttaataattcataattatatagcatagcatagggcagtttcagatgcttcaactaccaggtaggtagaataaaggaatgaagttgctgtgtatasgatgataaatggtgctaaatctatgtccccaatatagggaagacaggagaaagtgccaaagatagtgtgcatgcctcatctctaaggggcagccattattgacgtccagctgartgttgccacgtggaaattagctataaacttgccagaacctccartttttctggagagattagattagaaattcatatatttttaaatattaaatcatccctttttcttgagatggtgtcacgtcgttgcccaggccaccgtttatgttgtccaggccaccctggaactcctggactcaagtgactttacccctttggcctcctgggtagccgggactacaggcgtgtgtcactgcatccagcttaagttatccgatttgtaaatggtggcaatgaaatcattgcgtaggccagttggagtgagccaaataaaatacatctgcagtccagattcaacctgcaggccatcattctgctgtcattggtgtagaagactttttcagcctagtttattctaggctcttttcatttctccctgatttgaggctttgtaggacgttgcacaggaattatttcccttttaaacgttagttttcattttaccagtgcaactctgctattggcacatctatgaaatacgtaaagctatcattttaatactaaagaggaaacacaaatttgactcatttccccagaaaattcccctcctgctttccatatgttatatagttaactgtaaaagtggcaccacctcttaaacagccagctattctgatcatttgaaatctggaacattctttcctacggtggttgacttttcactgcctttgaggttctttccaagtaaaggcgttatyctttgtggtgtgctcctggaggtcactaacaaaacgtctccagcaggtgttgtgtggattcccccaaatcygtaggctcttatttcctagacatgaagagtatgtgcgccttctttttggttaccctggaccagacattcctcagcactggcttgcattggcaggaggtggcagagggagaggacagtaaccaataycgctccttctacatgatcagtgttcaggttgaagacaaacagggctccaattatgttgtgatttagaaggygacaragctgagacctcaccctctgcttatgggctgcatgcctttctcagtgaaataacgcagaatgcagaggccatgcctgcagatcaggggtgctagaggataggcaagaagtaaagtggccaccctatctcgtgttgagagcatgctagtctcygaacggcctgccagggtgcctgacagccagagccacctaatgggcctatttgatcctggagttgctgtaatggcaagaaaaaccatggcctccagccccagtgttgaagttttgacgctaatgtgatgataattctcttttctttgastggggacttgcctttgtttatctttttttgttgttttagccatgaaatatcacatgtaaatagccgaggatatctgggctctgagtctttaaaaggcaacagaaaggtctctgttacgaagggggaactagttttcattgtcactgtattaagcagaagttgggaatcatagaagaccttgatgttaccatatcccttgttaaatttcctctaatactattgagaagtttatcctctactttttcctgtagagtaaaagatatcgattttgtttctgtcggcactgccttggaacttgcttgcatccctcccccacgcgaggcgaggccctgaggagcgggattcgctgacccatgctggcagaacgggtgatggatgaggcagagaagggtacaggctggctggaccatgcgatggggaatgcaggyggaacaggcttcctcctgaatcaggagtggaagaggagtctggggtgaagccaaggggaagacagttaagctttaaaaaaccaactgcccagccgggcgcagtgtctcatgcctgtaatcccagcactttgggacgatgaggcgggcggatcacgaggtcaagagatccagatcattctggccaacatggtgaaaccctgtctctactaaaaaatacaaaaattagctgggcgtggtggcgtgttcctgtagtctcagctactcgggaggttgaggcaggagaatcgcttgaacccgggaggcagaggttgcagtgagccgagatcacgccactgcactccagcttggcgacagagtgagtctccatctcaaagaaaaaaaamaaaaaacaaaaacctgccctgcccagccatgcccaaacagagtggccagcagtcagcttagtgtgggcagagctcagggaattattctgcagtgcagctaacatctagcaccttctttgtgtcaggtgggccagcactggggtggaggccgagacagcttgtgagctcactccctgggagatagaacggagtacccagttgcactgagggaagagcagggatagaagtgggctccgggtctaggagacggtggaaagagaggactgctcctagcgtgagagtgtcagggaagcttgctgggggaaayacaaggaaggaagagaatgcaggcagctcaaaagagccsggcaaggagacctgcagagcgagcggaggcctggtttctgtgaagcacagggcaggaaaatccaaactcacttgagtacacgctcagggtcatgggcttgctatatttttcattcaaccgccaagaaatcttgagaggcagctttatcatctccatgtgaggaggaggagattcaggcccagcgtagtggcttgcgaaaagattccagcactaaagtttgaccccagtcctacctgacttcctttctccagctgtgagactcccctgtacaatttttctggagggtctagagtcacatgagtcacgccaagccgccctttcagtgcgaaggaatccaagcagagccctcctctgctgtgggtacttacttagggaactgtggaggtgtcctcaggtagccactggtgtgtggggtcataccaagtcatttggtttacatcgggaatgccttttgtcgttatgtctagacccctggagaacagcccacggcaatgcacttstggaaattcggactgtgrattacactgagtaacaatcctaataatacctgcacacaatcagttgcctgtccaaaaagcaataaagaacctctagattttgtggtcaccatattaatcataaattggggatcatagaaggccttaatctcattgtacatacttttctattcctcccagtaccatttaaaggttagtgaaagcaacctttagtatcatctgttttttgggggggkttttttgttgttgttgtttagctgtttatgggtaggagaatgcgtgctcttttagggacatctcttcaaataagaacaggttgtaacctacactcaaaagagatgctcttggcaaggtatggcccctaaggtttgaaagcgttttccaggcctgctgtcaggccaggctggactgtccacaatttcttgtcctgcctcccgtgatgctagccatggatgcaccccagaagcatttagaatttgggagaaaaaggagcaaggcatactgcccaaatccaaaacaactttggctccctttggcctccattctaacatgctgagtggatgcatcatggatagtcttttaaaaacaagttctcatctattcaatgtcagagccctaaatggtatgaaaaataggcaacttgggtcatgccactacagatcgacacccactaaatccttttaatttagtctagtgcaacaagkatttgtgtaagtgtcctctgccctggacaccrgtgaggtcaccgtgggaatggctgggcaggaacaaagccttttgtttccagctgagtttccttttctgaagattgcctgtcctagacaccagttctctgttctctgtgactctgattcctgtctcctcttctttcactctcatccattttcaatactggcccctcatttcacttcctcagctaaatctacctctcaaagatagacatggacatataaataattttttaaaatcctcttttgcaaaaaaaaaaaaaaaaagaggtgaatttagttgaaaggatatagccaywcttttctgaagtgatggggatattcgatggcaattttgtgttttcttcacttggaaaaactaaaaagtttgcaacatttaaaaaaaatacaacccttaygctgatggatgtacactgtaaaacaaccacgtttggtaaactgttaatcactttcatagtgtatgtggatggagccagttaaaccagttttcatgtcttttgggtccttttgagtctgaagataaccattttttaggtcctcatgaacctctgagcatgaaccatgaaattcctattacacctgtgcttttataaacttgatccaaggtttaggctctcagtgcctgtttcctgtttaatacatatcatggttttggaaaaaatgaaagaaagaaagaagaggaagagctgtcattcctctgacaagtattttcagtggaattagggtcatgatgtcatgcttatttcaaaagatagcttcatctgtgccttcacccagacttagggttctagattcttctagattctacagcaggcactggcaagcttttgcttaagaaggcaagccgggaatggtggctcacgcctgtaatcccagcactttgggaggccgaggcaggcagatcatgaagtcaagagatggaaaccattctggccaacatggtgaaaccccatctctcctaaaaatacaaaaattagctgggcatggtggcgtgtgcctgtagttccagctactcgggaggccgaggcaggagaatcacttgaaccagggaggaagaggttgcagtgagctgagatcacgccattgcactccagcctggcgacagagggagactctgtttcaacaacaacaacaaaaaaggtgggggggtgggcagagagtaaaatattttagactttgaagtctaagagacaaaattgaggttattatgtaggtattcatatagcatttaaaatgtaatcattttaaaatgtagaaatcacttttagatcgtagaccataaaaaaacagcaggaaaaactacatggttggctggatttggccaagttgacatagagagccaatccctcatctccagcagggcttttactcaatgatacagtgygcatgaattgcttgggggattgtgtacaaagtgcagatttggttataggaggtcagggaggggcctcaattctacattcctaagaagctcctaacaggctgataatccatggatcgcattttgaatagaaaggattatgcaaaaagccagagtttttttttcccttgycttataccagtggtgcctagcatggtgtcaggtttatagaggactaatacatataagaaggagaaagggagggaggargaattccagttgttttttttttaatctaggtacaagtctctctgttgatttctaaacatcgaatgaagatgaaggaaatacttaaagcacctaagcactcataactcacttagtcatttcactattaaaagagaaaaatagttagtttacaatttccaggaaatcagacaggtcaccaccacctcttcaacgactggaatttgcrcagtctcactactcataggcccatctgttactactaacagtgctaatgtgattgtctgtaggtctagcaattggaggttgttcgtttctttgagacaaggtctcactctgttgcccaggctggagtgcagtggtacaatttcagctcactgcaacctttgcatcctgggctcaagcaatcctcccacgtcaacctccagaatagctaagacccaggtgcgcaccaacacacttggctaatttttgtgcattttgtagagatggggttttgccatgctgctcaagctattctcgaactcctgacctcaagtgattcacccgcctcagcctcccaaagtgctgggataacaggcgtgagccaccgctcccagcaacaattgcagtttttaaaggcagaaaatattacacaggtgggttcaaatttgccacaccaagtagaaggtgttggaaggaaaattaggaattcttaagcttcagaagattagtagtcagagttaaaaaccagacaattaacaagttaaaaaaaaattgtgaagcacacacagctgttatcttccagaaacactgcttacagaggtaattgctcacagattttagggtttacagcaggtatcacaggatttcaaatttaaraggggggtgggggcctgtgttcaaagtcttaagaatatccaagggatgtatgatgtatgcataattacctgaaattgaaactactgtagtttaaacacttgctgaaagaagaccttttatttcatcttctctacaggctgaaggaaagaaaaaacaaaactaacaactaacagaaaaacttttcatgtcgaatatgtagatttacaatatgtgaattatcatcagaagaatgaggttctttgatgattgttgcagataccctgaagaactggcccttgttgtagaagaatggcacagggcacatggtaaaatggccctggccattcctttagacattttgtttgtacttatattaacttgagagaaagtattaggaaaaacagagtaattctgtagaaatattcctgatgatacactaggcaaagcagggagaagagaaaaagtgagcaagaaattgtgactatgaattccaaaccagtttggctggatgagccaaaaagacaaaacaagagcattcaagagtctgtcaggaagtggtggcctttagttcattttagtagcaagaaaactgatctttttctgattttaagaactataccatctctattctgggcttcactcttagctctcacagttagaaaacagtgagccttggtcaagtctcataaactgtgtctcagttttttcatttatacaatggccaaaaaaaaaaaaaagaaagaaascacaaaaccataccttctttgcagggttgtgtaaaggaaggttgaactagaataggttgaagtcaatcacatctctaaggcatttggcatgtagtggaacctcagtaatcagtagtttttattatttggtgcacgatgaaactggctatctggagatgttttaaaatacaggttttattattatttaggtatgctaagaccagcagatcaggagacaatgaccactgaaaagacagtttgtgagagttgtgatgattgtgatctgtgtcctttacagtttgcaagggaaggggacatgctatgtcagagtggagggacatggggaggcaccaggactggtcaagaggcagagggagagggtcaaaccgtgggttctgtggggaggamtgaacgaggcagggtaagtagactagggtttgagtaagttcagcaggctctggggaagaggggctgtccctatttttctggtacctggccctgggtgattagaaagggtggatggtggcctggggcatgagaaataaaggaggtggtggggtgtaagttctggattggttgggttgcattcaaaaggggtgcccccaagtgagttgtttgctgcctctaggaatttattgaccctgggaggggagatcccagatgtcaaagcatgggaggacagaaaagaaacagcatggttcccacaagagagaagtagacagagacctctggaagtttaaaaatatatatgttgggatttcatagatgaggtgagcaaaaaattggccgggaagaactattaaggaggagatgatcagaaacattttcaaaatacctggaacaaacaaagaaccacatttcaagaaaaagacagagaaacaagactagcaaatagagttttcaggtggaaaaatcacacgttggacaggagactgaaggtaagggaaaccaagtcaggctttaacaccattctgaattgcagctgcaggatcacttgctttagatggaatcacccagcggatggcgtttaactctgctttaaaccccttcatggcttcccaccacacttacaaatacatctccttatcctgtcagcaggggcttgcttaatctgaccctttccacatatgctggatcacttcacgcctccctgttctttcaattccttgaacacaccaagttcctgcattcccgcctcagggccttcaccttcagcctctctgtccccacctgctatcctccccagctttgcacacctgattgctttttgtaagtcagatctcagattaattgtcgcctttacagacagatttttcttaactctccagtctaaagaagccacctcctccagttctcagcactgtgcttctcactctcgtttattttgttgtttattcatttgcttgtcatctgtattttcccactagaactcaagtttgtgacaacaaggacctaggtcattttcactgctgtagtcccagttcctacaacagtgcccaggacacaccaggaacgtgacatttattgaatagatgaaagaacagtgtaaaaaccacattgctcttcactctgcctgcagccaactcaagaacaatttcctaaagcagctctgaaaattacgaaagaaatagtgcatggattccagccccagtaggcttctgggcttggtgtttctttaatttcatgtaaatttctctaagtaaatatgccttaaaagtgaataaaattttatttcgctttaacaagagaatataaaagttaaaaaggtcactgtagtaatagactaatctcaattaccagggcagcctctgaaaccctcactcccacctaatctcattcggtgcatacgcagctcaccgtgtgatttccaacacagctaaatgaaattataaagcagtgttaaatttattaatcatttaattagctaaatgttcctgcaagtactggctagatgaatggcatgtcattttctaatgcaatttgcctctcaggcagccagggtcagaaagggaagctcctggcatctcgaatgagctctttatatcacaccttctactgggagacggttgttataccactgattatatttgagacttgtacacaagaccagggcactcagatgctggaattggaaaatgctctctttcttacctgggttacaaagaggaggctcagggtagctgatgagtcccccagagattgtctctccccgtgtccccttgcaggacaaatcttttcatatttaacaagccactgagcagaacagggggaaagatagcaggcagtattaaacgcatgctcaatctagttttatttcttcaaatttactcagtcgagaaaaatttgtggagtgcgaattctcctcatgctaggtgactttctaatccttctagttgagtcaggatttatttctccattctcgccttctagcctgggcttgtcagcttggggtgtatgccgcacctcctctttgaagaggatcttcatttggaggggtgatctgactcccaaccctmcccaggtgaaagcaccgggattcatacctagggggctttgggatttggggctgactttgacccgtcattatttctgactgcaaaattcctgacaaatgtctgctgctgggtgctctgtgaatctgttcccatttgcagtgagagtgctggcatcaagcacattgtctaaattcactcggcaagaagccgttggagtgggtgccacgtgaggccgagaacatccaaatgaacactggtctgtttgttcaagatgggagctgtcagttgtgagagctcctatgggaagagtgttttgatgtatagacatccctggtccacagagccaccaagcaaggcagactatttcgtgagaaagaaggaagatagactccatgcaacacagtgggtgtggcaccaagcgggaggtggagggttgctacctagtcccggctccacctactgtcacctgcattcccctagacaaatcacagcacctcaggatccttgatctcatcatctgtaaaacagagatcagatgaaccctcgatattaatatcaataagagccgatcataggactgctctaaggattaaatacaatgatgtaacctacttgaaagtgtcatataaattctgaggtgaagtggaggcattatggatgcattttattttgttttattttatttcayttattctttttttgaagaggtatgggtcaagcagatctgcagcccacactcggctcactgatcacgtcccatacaatcttggcagatacttagctgaattccatcgatttagtgataaaatgggaacagtagtaatggtgcagattagagaaaaaaatgtgatttgtgcattcatwtgtctgtgtgtacatatatgtatatgttctgtgtatatgtagacatgtatagatgcatgtgtgtacgtatacacgcacacatacataaattgtgtacatacacatatacatatacacatacaatacatatattctgatacacatatgtacatatatgtgtatacatgctatatataatgtagcacgtttcctggcaccttgtttggttcaataatgttgctgggattatactacaatttccattactctgactatggcaacactgctgatataggagatcacttttccgcacaaacacctctaggtattgtttaacacagacctcatgaaataggtttgccatggattagataaggcaattctggactcacttccaggatagaaggcaaagacaagtaccaatatatttggtaaaaatatgacatgacatttgagtgcacacaggcaagtgaaggtggtttcaaatcctccctctgtcttttcccagctaaatgaccttgtgctggctcctcacctcctaagcctcagcttatctctaggatggacgtcattgtactcccttcatcccacctaaggttgttgttaaggatgaaatgaaaagtccacagcataagcttgacacataaaataagcacccgatgaatactgactaaagagagaggaggagtaggggagagaaggagagaagagaggaaatgaaaatgtttctgaataagttatgtctaagttttttcactttttattttttattgttttcaggacagggtcttgttccattgcccaggctggagtgcagtggcgtgatcttggctcactgtagctgctgtctcccggattcaagcgattcccctgcctcagcttcccgagtagctgggattacacccacsaccatgcccggctagtttttgtatttttagtagagatggggtttcaccatgttggccaggctggtctcaaactcgtgacctcaagcagtccacccgccttggcctgccaaagtgctgggattacagacatgagccacctcacgtggttgagattttttcactttaagaaatgctttttctgtcacctccctggactgtcttggatttgtttctttgaggggaaatatgaggctttaattttccctcccaggccttggaaaggccaagagaagcctggagataggaatccacctacacagagtgtctcagtaaattggcagtggccaggaccagaaccaggacacctgtctcccagatctgtccttttcttggatagcttgaagttacgggtagttattgaattggtcactggctaccccctgaatcattacctgattttttactgagtgttcctacctgtgagtaaagggtgcctggttttgcacaagtgttttcttggcccaagagatatttttatatttgcctttgggttgatgagatgctggtatgtatcattcgttcagccattctttcagtaagtcatcacggaagtctgcctctgtgacagattctggggctctaaggmggaatttacttcttcaaagtacagtttcctgccttgcaagtttggagttaaggccacgcagaccagagttacgtgcacaggttgtaatactctctcttgtccctggttgcctgattcaagttaggggcttcttctggattccgtaggtaggatgctgactctcagctgtcctgatgccactggtgttcctctagtaggcaacattgatggtaaacatagaaagtcatggaaggcctcagttacctctagccctgaagacacagggatacccttggggcggagaccttagggacaggacaataaagatcaggccttgggagatgcaaacagtttgcccttggaccatgtcttctgctttcatccttatgctctcaacagatcatgccaaggtcctgtgttcaccgcsttcctgagtccccattcagaggctcaagaattgagacaaaagggcatcctgcaaatttgctgccctggaagctgtgctgggggagccagtagagacttcaggtggatctggaggtccttccccaaccttctgcaaaccatgtcttcccagagagcttctaagccaaagcaaaggtgttgctctctgcctcytgttgctctgtaattcatctcagcaaccatctttcccatctctgggaagagaatgttgtcccccagaaaaagtccttatggatagatttagttattgcttatggtttagagaaagcgcctttcaacagtcacatgcaagtattctttcaggcatttatccaaacacacaggatgaggcctctttgtcaaaccagtgtttgttgacaagcgacatttgtgtgcaggagatggctcattgtgtgtgtttacttggagctgttatatatgctgggggagacactgtgtatacaaacctaggagggagagattgggaggagggaagaaagtgaggaataggcttagtgagaaagagaccagagaaagagaaaagaaataaacattagcagggtggttaaacatccaagcattgaaaactgcgtggtggagctatgtactaactggggggtcttgaggaagcccattagtctccctgagcctcagtttagtagaagtaggaatcgtcattaaggcgcctcatttatgaagttactctgagctctataagagataagcatacagaaaactttggacagtgccttgcacacagtcagtaatcaatgcatattcatcatgatgttagagaaaggccgggcatggtggctcacacctgtaatcccagcactttgggaggccgaagggggtggatcacctgaagccaggagttcaagactagcctgcccaaaatggagaaacgccatctctactaaacatacaaaattagcctggcatagtggtgcatgcctgtaatcccagccacttttgaggctgaggcaggagaatcactggaactgggaggcggaggttgcagtgagctgagatcgtgccattgcactctggcctggacaacgagcaaaactccacctcaaaaaaaaaaaaagagagagagagaataaggtcagagggggaaaagagagaaagtgaaagcaacagtaaggaagagaattggaaaaaaaaaaaaaaaaaaggaactgatctggctgtatctgtcgagttgcttctgccgtttctagcccagcccacggttttccctctgcagggtgtctgtgggcatggtttgcaaataaacagtgagaagtataagctaaacatagactttaggcatatacataataggcaggcgtgatcgcgttcacccattcagtttgccatataaaagcttttcctcggtgccactttatggcccagaaacaaggctacaaaaactttaatactgctttttattttatagaaaaatataaatcaatactttcatgtctgtttgacgtgtttgggagctacagcaattgaggcttgccagtgtctggatgccccaccactaccacgccacttagctcagagtttgtttttttccttccaccatgtgaaatgttgctggttaaccagttaaaacggggagatggccatgattgcttttagattgccacttccacattgagtgaattttataataagaagccattttttccccgacaggctgcccttgtgcccgcctctctgactttgaggtcctcattattgtgggtttaaatgaaggatgttcattcaggcagggatggggggatggggggaggccaccaggcatcagcgctgttatcaggaccttctatcaggccaagtgacaggcgtccagagcaagaatgcagagctcatggtggagacctccggctgacaccaaaggtgactcccctcactctaaccttgaaagggaaagttcccactttattaaaatgaatttcgaaagggccgctctgacagctgcataattaaatactggagtgtcagcgataatttattccactcgcatgtggtggtcagatccttttcactagagggtcagcaaactcagtgacagaggcaaggagacaagggattcagggccctttgtcatttatgtagcaccagccctgaaatcggagactcataaaacctacaaatacacacacaaacacaaaccaggcaaacccacacaccacrgagaagaggcaaagtgtgcataaagataccctgttgttattcacccagtacaactctctaattcatgtataaacagtaagtgtaaaatgttccacacccttatgtatagacttttaacctctatttgagggtctctgggaggaccatagttgtttctgaagtatcacttatcctacgttccatgtaagatctctttcctagggtaaacttgatatggaaggtcttcacagattaaaacgaaggaaaaaaaaaaaaaaaactagataaatctccctggacatgaacttttgtagaagtagttacaaygctagtgacctcatatactcatggtaacggcttccggcatccaatgaccttgccattgcggaggtcaatttcatgtgtgtgtgcacacatgggtgcgtatatgttacagagggaaacttgcctgtttgaagcaggtgtcgtggaaacaacatgggctttagagccagacatggaatcctttcttatgattaatgcagctaaatttcccactgcagccggtagcatattgcttcataaatgtctataaaaaaatacgaaaaayagaatcagagcaaattcagcatagacctccttgggatgtttwttctttgtttatgttggtgttttgttttgtgttgtttcagctggggtgcagttgtattctgttccctctttgctagttcagaggcagtgaaagcgtgcttctcaggactcattgtccagaagattctgcctacagctggttttacgcagagaastagcacacaaacccagtccatsatttcttatttgactctgtcctgtttactctgtcagggtgaaaagcacaggccaagctcggctagtcaaagcattactttgtcacaggcaggcttggcttctccgagtcagcctgaacaaattacatccctcactcggtcgccgaaccgggaacagggttataactcagtctaagcacccgtccctcttctattaccttcataaccaaggtcatactaatcaactcaattaccagccctctcagacattttcataatgttttctggtagttgctctcctgtgaaaatctttcggtctaagcaarttaatgtcattttyataactatctgcatttcaggtacagtgatctcctttaaaaaggctgcgtcccagcagcatagaccarctttacctcccagcgtagtcttcagacaagttrgggtattgccgaagtccattcttgactttttttaatagtgcaaacaaatcatcttgtttttaggaaaacatgaaattataaagaaattgacttcaatcacttctggaggcagagcactgagttgcctccccacctcattcccctcactcccaactcagcaacctgggtgtttcagccagggcttttccaggccttaatttctctgacacaggaggatggaattacattatttccaccacaaagattgtgttttaaatccttcttagtttgcagcttttcttcccttttgcctcctctttagttcattccaatgataaatcctccctcctttgtcacagagccactgtgtactttcatagaccatcctatttttcaacgagagttcagaaccacaccatacgggcartagtccgcattttcaacatttcctaacagcacaattgttaggtagctaacaattgaattgactrtgtcaggtagacttatttttcgagttgtgctggttaactgcaatccaagtttaggaagcaaactaccaatttcatttaatagaatgagctaaccaaggcacatggtgactactgtccctcaagaccgctgaactaccacttccagcacctgctcagattattcattacaatgaagctctttaacactgtgtttgcattctttagtatatatcttgttaatagtaggccctgaataaagaccagttgaacaaataaactatttttccatgtattaattctttagtgaacttgcttatttgttcagaagagacattaagctaagtatacaacactcggtaaatttcaacttcatcatatatataataattatttttttttgagacagagccttgctgtgtcatccaggctggagtgcatggcctgatctctactctctgcaacctccacctcccaggttcaaacaattctcatgcgtcagcctcctgagtagctgtgattacaggtgtgtgctaccacggccggctaatttttttgtattttattagagacggggttttgccatgttggccaagctgatctggaactcatgtgctcragcaatccacccacctcggcctcccaaaatgctgggataacaggcatgaaccaccatgcccggccatcagaaatattttatttcactattttaaaaaattagcaargaagcaaatatgacaaaatgctaacaattccaaaatgctaataacttctgagtggtgagtataagtgtgattattatattattcttagtatttggtttttttctgtagtgtgtagtttccctccatgacactgagggctcagrtggctctgaccttggagacagggagacatttagtgaaggaatgggaggtaaggagctggcatctctggtgtgtccatcatgcactgacctgcactagatgttttgcttccagagtctcctggaatgctccatggcctccacgcatcgtaattcccatcagcttaaggcagcgaagcgaatgcccacagtgcccaagtcacttgcccaaggttatccaagtcaaataagacagagatgagattcaaattcaggccacaatgacttcaaaaacccttgtatccttgttttgtttcgtttccctgcaaacattgttttagttgagatgaaattcacgtaatatacagttaaccattttaaagtgtacacttcagtggcatttagtgaactcagtgttatgccaccgtcacctctttttagtttcaaaactttgtcatcaccccagaaaagcatacacataaagtcatcactgccccattcccttcttccaacttctctgcttttggtctctgtggatttgcctattctgggtataccacataaaaggaatcaaagaatatgtgaccttttgtgtctagctccgttcacttagcatgctgtttccaaggcttgtctaagttgtggcatgtgtcagtactttattcttttttatggctgcatagtattccactgcatggatataccacatcttgtttatctgttcatccattgatggacatttgggttgtttccgccttctaggtataatgacttgtgttgccataaacatttgtatacaagtttctgtgtggacatgttctcacttttcttgggtatatacttaggggtggaattgctgggtcatatgatcagtctaggtttaactttttgaygaactgacaaactgctatccacagtggctgcctgtaccattttacagaaaatctctgcttttaatacttctggatgtgttctaaggcactaggcttttcattaagttcatttctgcagaaagagttaaggagtgttctcaggtaactataatcaacccccagggacttactcaagttgtgcatgtgcaactgaaatatctggcaggcatccagtccctgttatttcagtctctccccgcctccctgcccacacctctgaagctccatattacccaggaagggacaatggggggcctagaaatgtggagggaggcaagagagtgataattatgccatctacacttgtcgactagaatttccaggtactttcacctctaggctcttacctggcttttgtgaagcccctcagggaagaggaggaaagctgggcaagggggaggggtaaaccaagtcccagsaaagtcattccagtttcccaagatcccggagcttgtttgtatccagctgagatccagttgagaccagaattcactctctccacacctccatcagctgtggcctcgagttccttaacattttttaaaacaaaaaacttttgcatgggaaaaatccctttagaaagttaaaggttttccttatacaaactatctcactttgaaaactggcccactgtaaaaatcttgattccggagcttccttaaaaatcttttcacccctttaaagtgaaagttatggagaatctattagatacaaattaatacgggcaaggcgtgtgctagctgttttataaacatgatcccacttaatcctccacttcacaattctgaaaagtcaacaaatttggcccatggtagagaggaggaaaccaagacttgaaacattaaataacrtgtccaaagtctcccatttcagagacaggggcatttggctccaggtttttctgactctagacagtagtttgtttttagcacatcaaatktctgagacttgtgatgtgtyagaaagcacaaaggactttgatcacaagatcaagccccagagggccatgactgcataaaccacaacaactgcgtggctgcctgtcacgtcttcatctgcaagttggaggaacttggagaaatgcagtgcttccctgcagctgcagagggtctcactgagcactattcttggaattcttaaaagctgggcctgtaagccttttttgcatttcctttcagccacctcctggctgtccttttaaagccagggtaaagtccccagcacccagaatcaaggatggggaagaggaattttgagaatgtgcttcctgcttcacacaaatagctaaagacagaaatgatggcacaagccctaaccaacaactaggaaggtaggttgtccaagacaaattgcagtttagaatggacctgccaaatgggtgggtgggcaggatggctgggatcgccagtgcccaaccttgccacagcctccttttgtcactctagggactacccttttcctccccagacgtttttcctgactctaaatagtgggaaaagtctggtttgagattgctgtattgcagggaagttcttacagcgggcttgatgggcccagaaatcaagatggaaaaaaacaaccctctatgttgatggccatgcacagtggctcagcagaactggctctgttgaccaggcttgggtgctctcctgcagggcattgcaatctttaggacaccttcattacccctcctaaaaggagattttataatgagcgccaaccagctcaaacaagttaggatctcctaacatgtctggtgaaaatacaggagtatttttcatcatctctggaaaagttgctatcatgtccttcaataacccagtctaaccatgtttttccagtggaaatgattcccggtagaatgtcctatgttccttttgcacatttctcmttacaaacatcatctcatttaatcctcaccacaaaactgatagtgtcatctccaatttatagttgaggaaatagaggatcagagaagctacgtgatctatgcaaggtcccccagctaggaagtagcaaagatggaatttgacccaggtctgactccagaagcactttcctcttttgcctcctaatacattttcttatagggagcatcctgcaatacaactgttaagaccacttaatgttatctttgrattaaaaatggtaccactctcataaatcaatgagtttcataccctaaattatgccagattaagaaaatgaaatctgactgtaaattacttctctaggagcaaatgattgcttgattctattgtagaaaataaaaattttttacytaaaccacacaaattaaaaaatggaactcactttcacagtcaagagttacttctatttttttttacagtaaatgcgctctttaagatgttgcaagctcaattcatgatttttttttctttttctgtatgtttctaaatttagaagttacatttacaaggaggtaatttgcaaggtcatccttttttaaagaaatttaagcaggagatgaggtctttccaggtttgagggtgatagctcgtgattcttcatcaactttggccaaaccttcgtggattcctgtgtgctgattattagtgccttgcctacaaatttttaatacattgacttatctaaatattcctscatgcacactccccaatctaagaaaaatgtgagatgttgggaaatgtttccaagaatagaccaaaggattagtcagcctagagaagtgaactttaagaggaactatgtttattcagtggtgattatttgctgacccagtgctaggcacgtgagagtgagagggatggaatgcttgcaggagttgccttggatatcacacactgacttgggagacacacatagcgacagawaattacaacatagggacacccggggaaaatgtagacgaggtttaggggttgctcagaggaggaattaactctataaggaagtattctgataatggctttcaattataggacatatctaataacatgattacatactctcttaatagtgtagcactatagttgttatttatttcccacactgaacaaatataattatcatatacaccctttccattattagctctctccatttttaatgaaaacagtggttggtggtttataagaagttttttgtcggtgtgatctttcacatcagtttgctacccagaatttaaacattccttttttgctgctgttttaatttgaaataagaatggtagcccccaggtcccctaacagtgggtgctgatttcacagtgggcttacaaatgctcttcaagagtatctcagtgttgagtccagccacccaagggagactggttcttcactgtgcatcatggccttttaatgccattttgcttttttatcatccaatcagcagatgttctttcttcattcacgttgaaagcacttcgctatggaaacgagtaaagttcattgtcttattttttgtttgttttgttttctgatgtcctgacagcagaatcaatcttcggaatccttttcaataaaaaaaaaaattaccaaaacaaatatgatcacagaagcttttaaaatctgaaatcccaggaagctaattagtgcatccttttaagatggcttcctgcatttcgatatacgcataagcttgggtttcagatgcagttggcagtttgccatgagtcagacaggtcatcctgactctcaggaacacggagctcctgcagaagcctgtggagcgagggcaagttgggatcctcccctgtgttagcacgtgactgtcctctgtcaccatgtagcaggtggaggccaggaactacattttcttgggttcctggtggttagttgtacgccccatgaacttctctcatttccttaattatatccaaaataatgcccttgttttatttccccacttggcactgagccttagggagcaggaactgtgtatatcccacagctttgcatggcacttggcacgtaggaatgtattaaatgcagctgctttcgtgcaggaagcgcggacttcagatttggtcaaagatccatgatttcagagcaggcagcccttttaaacctgtatctgagtcacttcaatgccttgtgtttctgctctgggctgcaaactcaagagcagcaaccacttatcttggtacctgtagtcccgagccctgtgtctggctcagagtaggccctacataaatgtttgctcctcctcactgagtggctgcatgaattgcatccagcatgtctactctgggaaagaacctgtggagcctctttaggagtgtgtttttgccctccctcggaatctggtgatctcactaccaatggcaaagacaaactgtgaggtgtttttttgtttgtgtgcacgcgcacgtatgtgtgtgtgtaaaaaggccatggaaatataaaattgtaacctaaatgccttcacggccagttatggtggctcacgcctgtaattccagcactctgggaggccaagatgagaggatcacttgagcctagaagtttgagaccagtcagggcaatatagactacctgcaaaaagaaaaaaaaaaaaatgccakgtgtagtggtgtgcgcctgtagtcccagctactcagggggctgaggcaggaagattgcttgagcctgggacgtcaaggctgcagtgaaccatgatggtgccactgcactccaggctgtgtgacagagcaagaccccatctctaartaagtaaataaatgcctctgtgaatccatytcattgcattggaaagacctccaggattctctscagaagaatctttcccaacataaaatccattgttaatcacatttgacacacatgtgtgcccatgtctctgggcctgtgtccataggcatctacgtcactgcagagtgaaccctttcggttcacatcacctgctcccctcctgggcctcctgaggggtgtgagagtggcacattccacaggaagggaaccctgcatgtccatgtgccatgtgccatgtgccatcttagagacgtaaaaacactttgtatgtttgsggtacaactcagtaacccattggtgcagatatgtgattcttaggatggcccacatgggtctctttcacacacccacgtgcatgacccaagtgagcaaacaggcagagactgggaccagaagctcactgtggttctaagcaagcagttgaactggtggcttctgatggcctgagaagcagtttcccttgataagtcttcagccacacaaaaagagactgtagctcacaacactcacagtcaaagccactggaaataactatttcctatcaaataaagcctttctcttgaaaaatttgaagaaaaaaaaaaaacccacctagtgaaaccttagaatcaacctgaaggttcaacagcaggtgaatgattccataaatcatagtatattcacttaatggaatactaggtagccactaaaataaaatgacagttggaaaaaatacttatgataaaaggtttaatgacaaagtggggttcaaaatgagagatactctctgactagaactatattaaaagaaagatggatgggggagaggacggtgggtgatatattatctacatagatactttttttcacttttcaaagtgtttaatgtgttgcacagcctttagaatttgaaaatgtctaacttaaaatgcctccctagtgaaatctgtggcagcttataaactggcaggatactgtattttcaagatacgcaattgtaagtggtgctcacatacagtcagaatgtttatttgaccttgatcttgtgagggcttggttcccatggctttgtagagtgaaaggtcctgagaggcaggttagtgacgataccgggacacgtattgtagacaggttgataaagcaagcttccctcagcccagttttcagtggcaaatgcctcttggccaccaatgctgtacactttgtttctgtttccttacctgtcaggcagttactgaaaaattatcttttcccccaaatacaataattagtgccttggccagacaagttacagcaaatccttcaagattaagaagggactagccgggtgtggtggctcacgcctgtaatcccagctctttgggaggctgaggcaggtggatcacctgaggtcaggagttygagattagcttgaccaacatagtgaaaccccgtctctactaaaaatamaaaaattagccaggcgtggtggcgcatgcctataatcccagctactctgggcctgaggcaggaaaatcacttgaacctgggagacagaggtttcagtgagccgagatcgcaccattgcactccagcctgggcaacaagagtgaaactccatctcaaaaacaaaaattaagagggactgatgtccagtgaatttctatgtccgccctaagcactgaggtgaaatgaagcctagatggttcttttagaatatgagtgagcagtactcatggttaattttagaagctaataagtatatatttgataactttaacagaaatattaatactaattaagagtaaaaagatgatgaataaagtagcttcacttattgagcctttactagatgccatcttgcataaatggttgtcattttgcaaaatgtattccatctaatattagcagtaaccctgaggacttggtattcttacctggatgtgtcttatatcaacatgcacgcgttctctccctcagcataccgtgtcttattaacttctaacctccctctcattatcccaccaatctctgccagtacaaccacatcaactgtgcagatcacttctctagtgtttgggatttggggcaacctactgggtctagctatgaccccataaaagttgaacaactctgccttaatggcgctaatttttaatatgcctcattctagttgcttgaattgaacgaaggcatttgaaaattgctgaagtgcttstcagtgatgaaatgttacagatcagtttgaaatccaactttattcaacataagaaagcctatatactctggagcttaaagacwgaccttttcacttactgtaaggtatctaagacttctgggtgtgggttttaaatatattttggatgagctttgttcatgtttacacatggccaccaggtcggccacaaagctrtggctctggtcagtctgactctctttagcaggaatcacgtgacaatctgtgtctgtgattagctccgtggatattactaggtagatttctcacttgtccttgttttgatcttcattcctgggtgaaagaatcccagggagtggaaaatgtaggtagttcatagggctcctgaccttccatggactgtgtctaactcagctgtgatgaggacgtgctctgattctgatgaaggatgttagcattagaggcaggcctgtgtgcctgttctgtgtcctggcaccgatgtttaacaaaaaagatcctttcagagttactcatacgacttacacattcccatgggagctccaactctgtttggtcccaatgtgccctttttgtctcactccttcctcccacayatcctgctccccactcccctaattactcatgattscactaacagccacatcctttcacacctctgagcttttggtcatgctgtaatctctacctgagttccattcctgcctccacccttgcctgtcaaattccttagcttcatgcctttgaattttagcagaaatgttacctgctctatgaaactggattttccctttgtctccattccctaagctgcacattagagcasctgttacagtttgaagtgacccctatatggattgtttgcacacctgtgttgcaaatgtattagttaggataggctgagctacagtaagaaatagcccccaaaatgcattatagctgaaacccccaaagggggrtttctaacacagaaagcaacataagtgggtagtcctggccaatggcagctacgttccacaaagtgactcagggatccaggctgcagmcacttagtggttccattctccctgctgatatctgcatccagtcatctggtatttcttaccagccttaacctcattctattggtaagcactagtcacatggctatctcccactgaaaagtaggatgtcaaatatcctctagccctttgctcaggaagaagagcaaatggatttttgttaagaagctggcagtctgtcacaggagctacttgaggatacacacagttttctccccattagcatctscagtctctggtataaacttgagtcttctctttggtccctgataaatatacatagaatgtatggatgtgagaaagttaaactgatgtctgtgtgtcttcatgtcattaaactttgaatctayggacatgtctttttctttctggcatagtttggaggtcttcattttrtgatwgaatacaaaacaccgagggctttaaggaggcatagtggtatgttcagctgtattttctcataatatagagtcataggaaacctgagccttggcatttgtaaggcraaaagacccctggaaaagagtaatatagtaattcatctttatttgaaaagtatatcatcatccatttatttccccactggcataatccaggccgactttggctccccttcctgtgaaatgcaccctttccctctcatcagtttccacccctcctgctgaaaatggagtacaatgaatagatgtataataaaatcttttaattgtcttagcatatgttgcttttattaggtgggcataattgcattcatgggatcacctacaaagtcctttcgaatataaaattgaaatggcttcacactcagtgcacaagtccttctgaggcactgttttccccttcgctgcctccggttccccttttgctgtgaagttcacattgaagtgtgaaaagagagacgtggcaactgacacatgctggatcttatcagccgcgagtgccgttgtggccgactgaaaagcgactgtcatttctacaccatttattcctcgcctggcctcattgctcgcttcgtttcggaggaaattttccctgttaaagtactgtacttgtcatttatttcccttttttccactctccctccgtggctgggtttggatatgcatttatccaaaaggcaaggcttttacacacttccgctaacctcttatggtcaggctcataaaagcaacccaacaaagcttttatggggtcattacagatccctcaaatccctctccttccagctttcaataattctcttgtctctaatcaattcaccggctcttttatttgaaaatgggtgatggagtgggggaaaaaagtgggagcatcagctgaaaacccactttatttggactaaggtttctcaatgtgtgttcagttctggctcatgcttggcacttacatttgagccatattcagtagtcccagccttacttgttcttttacaaaaagggtcagcagactttctgaaaagggacagatagtaaatattttaggctttgtggaccatagggcctgtgtcaaaagtactmawtgttaccattttccttactttgttcaggctgctataacagataccataaactaggtagcttataaataacagaaatgtaattcttaamgttctggagcctgggaagtccaagagcaaagcaacggcagattcagcttctgttgagggctcgttccctggctcatagatgrtgacttctygctgtgtcaacttagtgggaggggataaagcagctctctggggcttcttttagaaaggcacaaatccactcttgtgatctaatcacctttcaaaggccctatcttctaatattatcacattggagattccttttcaacgcttgaattttttgaggatgcaaaccttcagaccatagcactatcatagtgcaaaacaaccatggacaatacacaaatgaacaagtgactatttgctaatagttttatttacaaaaaacaaaaaacagtgggcaggatttgacccatgggctgcagtttgctgatccctgttttattaattagttaatattattgattgagatagggtctcactgtgtcacccaggctggagtgcagtggtgcggtcacagstcactacagcttcaacctcctgggatcaagcagtcttcttgccttagccacccgagtagctggatgacaggtgagcaccaccatgccyrgctaattttctaaattttttgtagagacaaggtctcactgtgttgtccaggctggtctcaaactcctgagctcaagtgatcctcccgcctcgacctctcaaagtgctagaattacagttgagagccaccacacccagcctgattcctgttttacatattaaaaatttcatctctccaatcttcgaagaatccgtagtccatttttaagtagctcttgtcttccaaaggtatgsgatgtgcmtacctaatgctcttcctggatgggagaatattaccaaaaacgtttggtcgactaattttatgacagtttccaactacaatttttttcctctttgctttcttttgaataatagaaacaattttttttgtttaatatatcttgaagtacttcacttaagaaataacttcatggtggcacagagagctgtttagttagaagactgagtattatatttcccattgactatgcaggaccttctagggaaatgtgagtttatcatactcctgcaaggtaaatgcagcagtgagaagaatcagtctactgtgctaaacctggccctgcctcagcaatattctgtgagcctggaggtcaagagttaggggaccaaggtcctgctaaggacacatgggggaactaccagaaactcatcatctcatttaaactcacaaaacctggaagggacataattaaaagtcctgtcttccaaaagtgtagcattaaactcagagatgtaaaacaacgtgtctaaatgccaggtaagcaatgcttacttgacttggaccagggtggtgaatgaacataaaaaccgattacaacatttttccatttttatgtttcctctgaaaccagccatgagaggtactsttagcaaatcacgccttattcctaggcagacttcttgggtacactttccaccctccccagcagtaatgcctgaccaactaatggaatcctaactawtgcagtatgtgacgcctggcagctccagtccgaaccaagggaaaacctgcaaacatgcaatccttcatgcttttgtttttgtttttccttcagcctagctaaaatgaaggcaacattcagaatgatgttagaatctaggtgtggaaagcaatgtagcttctggctggttccttgagtgaccatgtggagcagagcttcccttccattgtatttgagccactggaaatctattacctgatctttctttaccagatccttctttagttgggtatggccaggctcagtgaatccagtagatgtttgaatgggaaaggactgaaagatctcaaccttgaatcccttaactccttgggatgtgtaatggagatgtataagctgtttttaaacatttcagcagctgtcatggaacttaaccaaatgagtctaagtaccctatgaacacatttgatttaggttggaattacagcatagatgtgaagtgacttgtccaaggacacacaggtgatgaagtttacatacaagacttaagtccatgttactggattcctagaccaggttttttttttccccttatcccatagaagatggttgttgtcttgaggtttccactgagttgctttttgagagattctattgtgcacttttgcccagttcaacaagaaagaatctttgctatgttagaagagactctggggaatccagagtcttggtcacgggtacatcaaaacgaygctggtgcctaacttctagttccagacaaagaaggagagagagagagrtcagtaatttataggctgacattttccttgggtccttataatacttgtttattacagataatttgcttaagtgtgcacaaggtggaaggtcacgcaaggaagctttttattagttgtgtactgaatggatcaatagtgatttgaatactataaatctatccgttaacaggtttatttcttcatcagatattaattccagagggtttcacccattataaaatggacataaagcctggggtggtgatggtgctgcctctgtaaccaggctcagctgtgtgtcttcgtgagcctccttgtggaccctcaaatgtgggaaggagataggggcaggaggaattggggaaataggaaccttagaaaccctgaagaagtggaaagagaaaaggaaggtcagtcattcattcaattgcttaatttgcttctttctttttctcttcttctttctctctcttctctctctctttctccctccctccctccatttcttcattcctttcttgtctccctgtctatctgtctgtgtatatctattcatctatccatccatccatccattcatcaatccatttatccactctgaatagaaacctaatatagatatacaaaatgaaaaactaggaaaatgcaagaaaccttgacaaaattgctactgtttctaattccaatacttaataataaccactgctacatacaaggacatttgtgtctggtctttttccctattccaggcacatgcattttaatacagttgagatcatattgtatgtctgattttttagcgtattagattttttacattattaagttaatacatgctcatttaaataagtcaaacaatatgaatatataagaagaaaacgctcgtaatttatgctctacctcttccctttgctaagtggcaattttggaccttctgtgaccgtgcaaacatgcagattatacatgcactataggagtggaatgtatgtgayttaatagcgtaatattttgtccattattttaaaacttgctttatttggtcaagacatacggaacacgtatagatcaaacaaaaatttttaaaaatgcttgcatactgctctgtgctgtggagtagccctaattaaatcaatcattcctctgtttatgggcattccatttcttttcaattttgatattattgttgttttagcccttatgaatactacagcaatatatgttattatatactgctggttttaattttgtaggacagatgggatttctgagtcaaaggtcaggtgacataattttgtatcctgtggttttacttaacactatgcagaacgatttcctcgtattgttgaaaactcttggtaggggttttttttttaattggctggaagcacttcatcatatagttgtaccaaartttgcttaacatcccccttattactcagcctttgggtggtatccagttctttgctttgataaataatgctgagatgaacatctttctgcatggctctttttccttcttttgacatacttggagttctagaagtggaattactgggtcggaggtcacaaatggagaggtcttttaaatctcagcctgcaaacaatcccactgcaggtttaggctgcatgtttcatccatttgcagctgtagcattttacaaaccacagcataaaccctaggaataattctgttccccactgggatagagcattgttattaatataattttacaaacatcattcgtttgaaagctttatccagcctcaccacagctcattagtgaaccttctgacaatcccggggcagtttgtggattctgcagcagacaggttatcgtgtgctgaagggtaccgcaaggggaaccttccaacatccccaccctacccaaaggatgattcctgctcacaccagccagctggagacattagagcattacttctcggtggcaagggagggactcttgttctttctggtggttcgttttcatcttcaggtcatgccctgtgtcacctgactcaggcaccattagcatctggggctgtacacgtctttgtactgcacactgtagggtatccaggattcctggccctgcccsatgatataccagcgccatgttgtcatcaaaacraccggaaatgccttttgtgtctccctacttccctttttaacatgtcagcccttggtctcgatattcacatctatatttttccttatcccgttaatatatgttatctaaatatgtgccatctttgtttatgggcttttggtgtaagaactctctgagaatgcagtgattcttcactgggattggaagggatcagaaggagggaaagtaattagcggggcctgttataatggggttggtggggttatttgtgcttttaaagtagaatatcagggtgtttaaaagccaagattctggagtcagaaggcctgggttcaaatcctgacccctcctcttgcaagcttgtgacaccgggcaagttattaacctctttatgcctttattttactataaatatgggataattatagtttttactgcatagttttgttatgaggagtaaatgagtcactatttctgagacacttcgtgcctggcasagaacgagcactgtgtgtgtgttacagaaatatatgtgggtgggtgtgtttctgttttccgtaattccagctaggcaaagacatatttaacaaaarccttctgggctgatgagcatcctcagaaagtaggctgagggagctcttttaaggcagcaggactaagaaggtaaagacatgtactaggcgggtcagcatagtggtggccctcgtctgacacacatatttcaggaggggtcacccctsccgtcttccatgttggggtgctcttctctggcaacccactatgggtactccactgctggccttcatgcaggtggaaccacaccgggaagacccaagccgaggggagaaggcgtgagcagagcaggtggcaggcaccatgaggcagggctagccttgcccactgtctgtggctgaccagctagactcttttccttttcttgcaaacctaatgtaggtacaaggtcaaggctccctgtgaggcttgcatagcaccttcaaccttctagtctttgtcctcccagaaggaaaaaaatgagaggagggagggacacaagaaaagaagatgcattttgtcagccaccgtgctatgaaatgctagcgcagatgacgttcagaactgccctgtgagcagacataaaagcttaggctcaaagagattaaatgtcttatttctgcttttggaagatacacattttatttttttctgtgtctctgaattggcatccaaccataatcattgtgctaatttactgtattcttactctccctctccagtgctgtgagtaaatcagtgtgttccttatacttaataacatactaagtggcaataataattattataacaaatgtatcaaataactatgtgtgaactctgcatgtttcagcccatttaatacccattacctacggaggtggtttctactattgcacccactctacagatgagaaaatggaggcacaaaaagttaaatcatctgccctaggtcccagagctggaatttgaaccaaaggttctgtgcctcccaaatttgtattcttatctctgcatcacactaacactgtcactcagtccttttctcactgctctggtctctatacttagagcttcgagacctgccactcagatgactccagaagaaaacacgctttggtgtcgtgcttgcctttgcccttgtcactttctcaactctcctcacctctgtgactgcatctttataactctcctttattagtgcttttgctggaggaggcaagcatgaacattgtcaaaaggactcaaaatggggaaaagtggcagcaattgccagcacaatcactgaaaaatcttctgaatggattgtaaattaaaccctcccccaaatgctcagaactgttgaattgactaattcaaattcattgagtcagatgcagttagtgtaacagtctatagtaacagtgtagactattagtttgtagagtccacacagaagagtccaattttctttgcacaaagagcctaccattcatttattcaacaaatgcttttgaacacccatcactgtgacagacagtggcaatgcatgtaggaacaaagtgtgtccatgggggcagagacctggaataatcagtcaccatgtaaggaaattcaccagaccaccaatttccacgccttgtatgtttctgttgtctttgctgcagactgaccaaaagcacaagacaaactcttgtccacttggattttagcatctttccctgaccctgcctctgactctggtgttgtgcacccactctgcaactctccaagctccagccctgtagtgccagcctgtacctgcctctcctgagggtcaatatggcatccagccttggtgaagtctcccaccccgtggtgattcatatctgaccctgagaattttccacctttcccagaagagtgggagtctaggaagacaaatagccaagataggagtttgaagaggaggcaccaatggcaatttgggttgttaattcctccagctaatttagttctgatttccccatgctcttggcagtgagacagttggctccagaggaaggtgataaaaaggaatcagtcaaggaacaatcaagaacgtgttacttttttggataatcattggctgtagggattctcctttacattttaaagagggatgaggttgagtctgtccctagcactgacaatgaaacatttatgctgtttataaaaatcaggaaacacacaaataatttgmttaacgctcaccttctggtccttttgtgatttgagaggtcttgagataagaaaaactgtggatgaattttactgaactattgaattgagaatggctgagggggagaggccccttccctctgtgaaatatagggaaaagttgtttttcttttctcctagtttcagaatacttggacttacagtcccaaatagcatcatttcctggtgaagccccctgaaccagacaggaaactgcctctcttcaataagagcagaggcagtctcaataaaaaacaaaatttcaacccatcctccgctttggtggcaggcagttcatcttctcacctctacttatttacagtttgaggggaaaaaagaggtaatacttgaaagtgtatttgaccatattttctaactgggagacaatttttttctttaacaattacttttggacatattacttgttagttaaaggagatgtgacacctcctgcccccctggccagccaagatccatttgtcatccaggtagcctcagaacggattgagagctcgccgcacagatctcatgtcaaagacaggcgcgtctgtctttcacggcttgggttgtcaggatgcagggagggccttttgtcaaacacctgccgatgagcgtttggcagagcctgtgctaagacatcatagatttccttctgtgttgtcttgagagcagagaaggtggcaggttaaagggaatcaggaaagaaatgagagtgaggataaacgagagggtgtggttctcagggtagaatgcatcggacactgcctagtgtgagaagggactcatctgttttctaggaagtactataaaaaagataaatttagtgctcagatatctgaggcctgatattaggaaaaatacggtaaggcatacatttagaacagatgccatgtctgtgtgtgtgtgtgtgtgcatgcgtgtgtgtgtgtgtgtattattaatatgtctgctggccttgagaaggtacattcagagaattttctgaagtctttttcacatggcctgtattgtcaaaaaatgatgttgggtgttttctgcctgtggctgtgggcctctgtgttcacacagatggtcatatgttcctaaaggatacatccaggactgtgctgacttatttggggtggctgagaagagacatgagccagatgataacaggaataattcagtgtgtgcttcccatggctgctgtaacaaactgcacagcctagagggcttcaaacaacaggaatattatctcacagtcctagaagccagacgtctgagaccacagtgtggacagggccatgctccttctctagagaactctccttgctcctctcgcttccggtggttcagtggcaacgcttggtgtttcctggcttgcagctgcaactatctgacctctgcgtctgtcctcccacggccttctccctgtgtgtttctggatctcttctcctttgttatcaggacastggtcacattggattaagggcctaccctattccagtctgactgcatcttaactgtttaactctgtattccaatctaattacatgtctatttccaagtaacgtcacattctgaggcaatggcggttgggacttgaacatatattcttcgggacatgattcaacctataacaagtaatactagtaatcatctcactcctgtaaacagtacagttgccatacctcaagtatctagtatacttgggacattagtctgggaatttttctccaatcctcacgctagcatttctagtaatgaggaaactgggggtcagggaagcttagtccacatttctcaccttttctccttttctcccatcccccagccagtttttcaacatattggtttttcaccacatgctcactgcagtgaatgttcactcccaagcccaaaagtagacatgtggagtgacaggtgtcactatatcataatatgaagaatttcaaaagccagaagtgcttgagaaaatataaattgtgcagtaaaagaaaacaccctaaatgtgcagagcaggaagtagaatgactctttgggtattgtgtttgttaggggggtcattagaaaatcatagacactgagccgaaccccctgggttcaaatcccagctccaccacttacgaattgaatgactttgagaaagttacttaaatgctgcgtacttcattttcctcccctgtaaaacgggttaatatcagcacttatcacatagtttttgagaaagctaaacgtgcttatctatagtggttattattactagaaagaatrtcgtggtgcccccaaacatggatttaacaagcattgatcaaatacctcctatgcccctacgaaccaggtactagaaatccactcctttcacttgcttttgttctgttgtgtttttgagacagagtatcgctctgtcacccaggctggagtgcagcggcgtgatctctgctgactgcattctccatttcccaggttcaagcgattctcctgcctcagcctcccaagtagctgggactacaggcccctccacascscacaccgccaccacgcccagctgatttttagtggagacagggtttcaccatgttggccaggctggtcttgaactcctgacctcaagtgatcggcctgcctcagcctcccacagtgatgggattacaggcatgcgccaccatgcstggctaatttttgtatttttagtagagatggggtttcactatgttggccrggctggtctcgaactcctgggctcaagcaatgcactggccttggcctcccacattgctgggattacaggcgtgagccaccatgcctggccccctttcacttgtattttttgagaagagaaagaaagaattatgaatgaattcttctgagctgtgagtccttcctgtgcaccaggcatggatggcaaggcacgattgataatgttccctcttatctcgaaatgtccactctctctcccatgcacrgggagtcaagctgtgctcttcaaacacaaattccttctcccacttcctgggtagttatgctcttttcttccctgaggttgctaattgtgggcagtacagtgtagagtcactttgatttttctcatctccttcctggaatgtgccacagaagaaaacccacgaagtcttgagctaaacgaagcagagatgggagaagggacaaggtgggaggcggtagtggtgctgcatgggataaaaatggaaacacacacttttgccctctgtacccaaaaggaaatgtcggtggaggcaggcgttcaagctggcctcgtgtttgtggttttagacacagctttgagtcgtgaccggtgtggccaagacctatttcccttgcaaatgctctctctcttttttcrgtaactgtgttactaaagttctcttagatactttacatttcctttcacggatttccaaaatttctttctttgagaatgtcaggaccagtaggaggttcagcacgcrttgccagagaaatcacagatgactaattggaatgcctcagaatcattctccttttgtttcacctaatttccacacttacgaagtcaaactctcagttaaatgtttatctagcaattcatttcttctgagccatctgttgctaggcaggatctgcagacctcttggttgcatgtgctgggttgggtcctccaagtctcttagcacaaagtcctgatgtttaaatcctgcaagcgaattgccacctttatttccaagttctcctcgaaatccacattcttccctacagacaacggtggggttcagtgtttgcttttcctggggctgctcggttctctcaccttgcatttctgtggcgccaaggtaagctgaaggcattagtattcacacttgtgtgtgagcagctgagctaacatgcaccagagggaaaatattacttctcataaatgctcaataattatagtctttattgcatgcaaatctatattgtgacacatagtggaaagcttttggattctgtgtggaagagttgacagagatttgcaggtgaaaaagaaaagaaaaaaaatacagatacgtgtatatatagagaaagacaaaaacttgtstgctagaaacctasggagagagatggtattgcccctgggacattggactttctgtttccagcatggtctgtcgtcttccataatggcatttaattttggaaaaattgcctgagcatttggaacaggcatctattaggaaagcctatttcttttttttttctttttgttttttctgagacaggatctcactttgtcacccaggctggagtacagtgtcaccattgtggctcactgcagcctcgacttcccaggcttaggtgatcctcctgtctcagcctcccgagtagctgggactacaggcatgcaccaccactcccagctttgtgtgtgtgtgtgtgtgtgtgtgtgtgtgtgtgtgtgtgtgtgtgtgtgtgtgttttgtagagacagggtctcactgtgttggccaggccggtctcaaactcctagcttcaagcgatcctcctaccttggcctctcaaagtgctaggattacctgcatgagccactgtgcccagcctaggaaagcatatttttgaggaataattatttctagtaatttctgttctaatctaaggggtttgaggttatcttttgacaatagatgttagctaggagagataagaaatggagcaagggaggggtttcatcccgccgtgttcatttgcttggctgtcctgaaattgcgaatacrcagttgttacctgctcccgktggragggrggggatatttatttggcatcttgcaattgataggagctgagtgattttagtaggtagtttaactccttaaaaacttccagtggtttcatattctacctagttttaggtgacagctggtatggggtggggaagsrgggggggataaagatattaatttggaagcatttgattgctccattattttatcatcttcccatggaaatgttttcataacgysttgttttttaattattattattattttttgagacagagtctcactgagtcgcccagggcggcggtgtgatctcggctcactgcaacctcagtctcccaggttaaagcaattcttctgcctcagcctcccgagtagctgggattttaggtgtgcaacaccacgcctggctaacttttgtatttttagtaaagacagggtttcaccgtgttggccaggctggtctcgaactcctgacctcaagtgatctgcctgcctcagcctctcacagtgctgggattacaggcgtgagccaccgtgcccggcctcatatccttttttatggaaaaaaaaaatcgggaattagcgtgtagctattaggcgtagattcctgcctaaggtctggatatgaattccaaagaccactggactttggaatattcrtargtctctgaaaattcagacccacagaggccttaccccgctacagagaggccccargagagaggcctcacaccctctggctccactgaaattcacttcacgtttccaacttggattaaactggcacgamagttcagtcaaatgtcaagtccattttgtcaagggagggaactcattcagaagatgaactagttggtgttacttagatgattaactacttggcattaggtagaagagggctctgccaactacagttcatggaccaaatcctgcctgctgtttgtttttgtaaataaagttttattggaacacagccaggtgcatttgtttacctattgtctatggctgcttttgcactacagtagcaaagttgagtacttataaatgtagagcctgcaaagtctaaaatatttactatctgcccttttgcaggtaaatttgaggactcttgagttagacagctaattagttggtgttacctaaattttgtgaattgtggctaaatctctcatttgtctacacattcaaataaaatcatgtatcaaaggtgatgtgtgtataataagatgctgggaagatgagcaaagcatgacttcttttttttgttgtttgtttgtttttaagagacggggtctcgctctgttgcagtgtcgcccaggctggagtgcagtggcacaaccttggctcagtgcagcctccgcctctcgggttcaagcgattcttctgcctcagcttcccgagtagctgggactacaggcacctgccaccacacctggctaatttttttkgtattttagcagagacagggtttcaccgtgttgcccaggctggtctcgaactcctgagctcaggcartctgcccgcctctgcctcccaaagtgctgggatcacaggcgtgagccascgcgcccagcccatgacttctcttyatgggagagaaaggccaccgagatagtaagtggacatcaggacatggattctattaaatctaacacctttatctttgcatttccatacattttgcttatttcaaagtagctacaactgcacaaagaatgggctgtcctctcctgctactttataaaagccaagtttttgcttctagctggtcgaaggtcctgtgggagctcacgtttttctcaatyactgatgaycatttgagacataatttggagaaggtttctatcaaatcctagytggactgcagtgaaatgttttcaaactagagaagcaccaaataggccatgataaagaataaataccacctaccccaacctggcaaatgtgtgctcacccaaaagtagtggagcctcaagctcagggagatgtgactggaaaatccactgaataaatgtctatttaaaaaaatcatagcgtctaggggatatacacttctaagcccattcttcaatggagaattacttatgcgcataagtagtttaaacaaaattagtggaaaaacagggagtttmagggagcaagagatcaggtcttctgggctcaccacacatcaggtgatttaagctaaaaatggcttaaaataccgcaatcacttgaaacgccttacataaactgaccaggaatctggggcattcgcgttagagacaattttcttctcctcaagataagggatggggaattagtcatagggtatytccagataatgtagttaacacctcgtgtaatattaggtgggcagggagctctgctctcaggaccaaaattgytcctgccagctctaatagggaatgtgtgtatttttaaagtctgggtaagcactgtgagtcatttccacaatacgcctccctttggcgtgaaatggggcagaaagtgccccaaacagctgttattttcgcagtgattcattcattcattcattcattcattcatthattcatccacccatccattcattcattcactcatcacatggcaactcatcacccctgtataccagacccagtgccaaatactggggagatgtgtgtgaacaaaatctcattttcaaggagcttattgcctgctgcacattttagcctcatctcgttagtgcaagaaataatttaacaactgaaaaagatgtgaggttgtacctggtaaggtctctattgstcaaggaaaggtttagcatggagagatttctcttaaggtgcctaggtattcagaagcacccctaaaactgatttgtgtggccctatgcttacaagtggagcctttccctcatttttgctttatttcttttgcctctcactttttatttcctttgtggagtccagcccctttgcttattctcagcacaaaagaggcagtagagtgagaagaacgtgaacttcagagcccacscatcccktttcacatttgaatcgcaactctgtcattcaccagctgtgcatccttgggaaagtcacttagcctctctgagctctaatttcctcacagggccgcaggactgaggttaaggacctgctgtcactggtacagtggttgaagaaaaggtgaatgaaggaagggcctcrttttactccttgtctcacattcctttctgctacttctctttggctcaccaaaaggagacagaagtttgtgtccatggctgtgaactgccaaagagttgccaattctctacgatctttgacctctgtgatcccaggggcaaggccagcactttccattccattagacttcattctcttgtgggtgctttctgctggaatctcccaatacagaacagaaagcacaggttatggaatcagatagaccaaagttcatctccaaatttgattccctctgcatacaagttgcttacccttgggggccctgtaaaatgaccataatagtaagcacctctgaggctcactggaagaactctttgttgtctgcacagaagatctcagcactaagcctggaacagaggagacttcagtcgatgtagggcatctccccaaactgcttttattctttatgcctcactgaaacttgaatcaaaaagcggctggaggaaaaagagctttgccaccgggcagtactgctgggtcttgcgtcacagagatgccttctgctcccttcttcagggagacctcagrgtatgaaagtgctgcttacccagcagatgagatttagtccagtcatccatctgcgtggtctctgtggataaagtaagcgtttcattcaacttttaaaaatattgcaaattgaccctcgcacatcttttcttactgccggtcacctagccagcaaagaccccaggtgagatcccactggtttggaggaaggagaggaaagtccccacttgggcaaaaacaatttaggatacctgaagattgcaaagcccagctcctcacaaagrgggtggcagctggggagaagctgaatcagtagacagacaagattgtggtttaacgagttcagggacaagagaaggccccagtaacctacagaagcaactagctccttgccttctgtacaacatggcctttggagtcacaggacgtgagtttggatcccagctctgccacttagtaattgtgtagatttgcacatgttgctggacctctctttgtctcagttttctgtaaactggggaaaatcttagtaaatctagctaaygtggttgttatgaagattctgtgtgtgtgtgtctgtgtgtgtgtatgtgtacaaagaaagtttagagcagcgtgtggcacgtaatgcatattatgtaagtgtagctcyaatgtgagttgttacttgtagagaacagctatgtcaaaaccacaccaaaaacgatttggaaaggaaataatttgactggtcattktgtttatccatcaactgagttggattgatatatttttcctttggccttcaaaggaaatttgagcattcattcattcatccttttagagaaatattctctaagcacctaccgtgygccaagctttgggttggatacctggaacccctctcagtgagatcacagtctaacagcacacacccaactatgaaatatagatggactgtgaagatgaagaaaggttctggttatgaactcacagaggaagtgacggctgaactttgtaaggacacaagtggtttaacaagtttcctggcccatatgagatctcggctccgacgttacaggcagcagtgtggggcctcaccttaccttttcccacttccatccttctccacccccgttcagttcccaggctccccttgtgtgaactggctcatttctcactgcctttctgttctacagcccccgctctgctgagtcaggaggtgctactttctccatctgctttccatcgtccaaaatttttgttgatgtttcttgatcactgagttaaataatttttccccgtattatacattcagtagagtttctggagagagtgcatacaaaaacgcctaactgaatctaccacgtctaagcagatgctcccagagtctatgcttttttcccccatgccatactccccaaactaaaggatgagaaagaaccatgcaggcagaatgagatgagtagatgctactgctaatgctgtcagttctactactaccgccactgctgtcttctgctgagtatggattatatgcctgttccatatgagaacattatgcatatggtgtgatttggtcattccggatggctaaagtgtgagcatacccgtatctcagatttacagagrwgaaaacagaggctcagactggttatgtatatttctctaagtcccccagctattgtttgttgtaggttgggtaccccaggaagtagattctgcaactgagattggcatgtaggaagattactggggagtgttctaggatccacacctgtaggggaacrtagcaagcaggatggggtggagggaggattgagctgtgctgtgggagatgcgaatgctccagtcaatcccaaggaaactctgaagctggattattcttcagagatgcaaggaggtcaggaagtcattgatgtgsgctccctcctggagtgcgtgttgctttggtagggagctcgctttggctgtgggcagttcctgaggagggactcayaggacagcctagcatctgaggaaatgagtgcctcctggcccagaatgggggatctcagcagcacactacaatatccactacagtttcytgggcttgctctgaagccatgcctctctaacttcagggtatattcatgtaagtgaggtgcagggatgggggaaagggagaaggtaaagctacaaaggtaagccagcttgtctagaccgggagctagctccttgtgaaggaatggcaatgataatggttaagtcagattcaagaagtgtgttttggggaaacactccaggtagtggtacatagaatcctagcacaagatcagtgactgggtgagtttgacattgtagatgcaaatgtgtsaggaattatagttgaaaggggaaagaacatttcagtttttcatttcctgcgtcactgtttttcttatttggagatgctgttcctctcamgtgggaaaaatttggttatctcaggtggtaaagatgcctttgtttaaaatattcttctsttagtggggacawtaatactactaatttctagtactgacgcttctcatgcaatttaatcagtaggaacctgtttgcatgttcatttgaggaagtaccaaagccaaaagtagcttcgaggtttggcacctctgataaagttacagaagtgcagtgtgagcaaaaatcatcctcttctctgttcttcacctgttggtgaacagtgagagaccaaggtgagagactcggaaattacacatgtacattgtatattacatgtatacaacatacattgtgtattacacatatacaaattacttgtcataacgtgcagatttcacaatgagagaccaagttgaaaaatgcttaaaattcacaagtctatatcattctgtcctccaggtaccccaagctggtttgggtttataccagtttgaaccgagggaccttcagctgaggaacatgtgctctgtgtgctggaagctcctggaggccccagggttatctctgctcacttaggtttgtgatgttgggcaaaaggagaaaatgctgagtctrttcggacccaacttccattaatgcctgagaaataatttaaatcgcaagatttccaatcccataagcagccctagcctctcttctcctgatactccacatacccagtctccattccttcttcccccaccctccagttctcatcctgtacactacctccagacccccagggattcagatcctgtctcccccaatgagagacttttttttttagggggagccaaattatttgttacaacatgtagatttcacttgttgtagagatgttctattttcaaggatacagagctcaaagggagcacaattccctggagagctagggaaataatgaagtctaaggtctggcagatctggatctgaatcctggcaatgcatttcgggagttcggtgtcaccctgagcatctttcaattccttgaacttcagtctcctcatctctgaaatggggttattatctacctgcagaggtgctgcagtattaactgaggcaacgttgcamcgtttctagaatgatatttagggctcatattgacccagtaggaagtatagttaccttgggccaggggagctacctgagtggagtcaacttttaggttatagggaccaagttgaaacatgcttaaaattcacaagtctgtaccattctgtccttcaggtaccctaagctggtttgggtttatacattcccacagtgcctaccacatcccaatggctttatgaccttgaggtcctgatctgttttatcatagctcttgatcttcctcaaaaattcttacagctgtattccacaggtcatcaccaagggactgctagaactggatcatagcagcttccaagagctgagtgtgtacatttcctcccaactctgcattcagtttaaattgcttgtggtgagagtattcataccatgggaattggcagacactgtgaatcaaacccaccccctgcactgcccccctccagtgagcgagttcttgaacacttactggtacaccactgtcaccaaccctgctttttrtagacatgtcctttaagcaaagcaattcatgggaaagtaaatttaattatcagaccatttcattagattcctcactgccacaaacaggtggttgtggtgataatctgggcttttttgatcgctttagaaaggcagttctgtaatgacatgaaaaacatattgcttggtaatttatttatttgttcccaatgtttgctacggattgtggtgaaaacacaaacacccaggacaaagggcaaggttcatcccaccatgacgatgggaggcagtttcatcccaccatgatgatgggaagtccttatatcaggactccagggatcttgtgtcctgatataaggctctcactttccaatcagcaggaagttatgcttcccagcctctaggaaagcataggagttaaggagaactgaaatctggggcagttataaatcttcccttatgtgtacaacagtttaaatcarttggtcatctaccaaaatctgaggaacaagagcagctttagaaaatgggctgggcatggtggctcatgcctataatcccagcacttggggaggccaagacaggtggatcacctgaggacaggagttggagaccagcctggccaacatggtgaaaccccgtctctactaaaaaaaaaaacaaaaaccacaaaaattagctgggcatggtggcatgtgcctgcaatcccagctactcgggaggctgaggcaggagaatcgcttgaacctgggaggcggaggttgatgtaagccgagattgcgccactgtactccagcctgagtgagagasagactgtctcaaaaaaagagaaaagtaaagaaaagaaaagagtaagattaaaaacaagtaaagaaaataaatcctcccgctttttttgctccttcatgggtatggctgcatcctctgctcactggtttgagttattattttcccatgggcaattaaagccctggcctccactgcagttttcacatcaaacctaagagtctcaggtgccccttggtggagcaacctmactagagacattaatcatactacgggataattgacaaatgcattgtgagtgtctgatttctgtggctcaggatgcttagtagcagtggggtcaagggcacagatgacacaggtccaaatttccccacccctacgtagtagctgtgtgacctggggcaggttgcttaacttttctggacttttgattccacattggttagatggaaataccatattattataaatattgtaaatagtacccatcaaacacttaatgtgaaccagaaaccctcataaaatgtttgctagtctttgttgttgaaaggtcactatgatgatggctcaaaatcctgacctgaaggtgtgctatgttcctgcttcacttgtgctgtggacatgttcctatttatcatagtgcagttgttgagactgggtgtctagagccatgtgatttggttcagctcctaactctgtcacttgctctttgacctaggcagaaaactttgcctctttgggcttcagtccccggtgtttttattttattttatttttcaagatggagtctcattctgtcacccaagctggagtgcagtggtgcaatcttggctcactgcaacctctgcctcctggcttcaagccatcctcccgcctcagcctcccaagtaagtgggactacaggtgtgcgccaccacgcctggctaatttttgtatttttagtagagatgaggtttcaccatgttggccaggctggtctcgaactcctgacctcaagtgatccacctgccttgscctcccaaagtgttgagatcacaggtgtgagccatggtgccaggcctctcctgtctttaactggggataatgtgtgcagaattccccctaaaggatctatcatgcgtaaggtggaccctcacagaaagcgtcaaagacacacgaatctcttagcaggaggccgccaggtggcacaaaatcaaaactgcatcattgagaattatgttatgaagtcatttactgacttgagcctcagttttcctattaatacaatgagactgtagtaacttcatagggctcttgcaagagttcagctaaaattctccaccttgccacctagaacatgtcacagaaggtatcctggcccctgtatgggattcatacatgaagaggactgccttgtaaagtcatttgattagggatccagagggtgtactggtagaggacagattttcaaccccttgacagttcgaaggtcagctacacaactggcttgtgttcctcgctgacacctccctgagtagcaatgtgcatttgtgtgccttccctttgccaggcatttctaagaggatgaatcctaacaggtatggcagccagagggcaggggcagggagaagaataagatgttccttggtgtaccccattgtcatgagttcatcatttctgttaactgtgggggcagagagttccaattgcaactggcttgttgtgagactgccccggtggttgctgccagatgatccacaaatgccaagctcctcacctgagccctgccagccttcaggacctcctttgcacgaagagcaatttgcagaagagaacactgcaggggaggcaccatagaccccttctggtctgtactgttcaaaatcacatgacatccgccagaggcctggtgggaagccagggttttaggcactagaaatggagctcagaaaggaggagaaaggtccctgctggtctgtggagagggccttggccaccagagggatcaaatggcccaggcaggaaataagtatcccgctctcagatctgaggccagattttcaagtgtatgcatgattctggggtgctacaaagggtatagagtatggagttagaacattacacgtcaacaagaatatgggttttgaacccagacctcagtttgaatctgagttccagcactgccccgttgcttggccgtgagttacttcacctccwttagcctctgtctcccctccactacaataacacctgcctggtggggagtgaggatattgtgcgaatcagaagtaataacaggtcgttggcacctaagagactctcagtaaccagcagtcatcaccaccgtcgtcgtctttttttttggccattacagttgggattagactaaccctccctaagcagctattragcctcacactccctggacaaagacatgaaaaactctggatgatttggaagggagatctagaaatggtgaaaggactgscaagtgcctctgtgctgataytgtacctgggctcagtggtctggctaaaggagaggtgctggggccaggtgacaggcgagtctctatacggcaggcccaaaaaatggaggtgcaggcttcatctatactttgatgtgtatgcttccttctttaaacttgtgataatcagagttatagctgctttaaacttgtaaaaatcagagttatagctgcttttgaactagtacttgttgtgtgcccaggaaatggccaaatgttatcactcatccttccaagaamcacatgaaggttatattattatgtcgactttccagatgaggagactgaggctcagtggyttgtcataggtgtcaaagacaggagtccartgtaaggacttctggcttcagcacaggggattttcctaccatcccatattgccaccccatctgcaaaaatacctggatctatcttcctcctgctgattctcagctccctccaggactgaagagatgatattgattctcacttgatagaggttagaaagggcctctcccttccctagctgaatagagagggtttcctttttcttttcttttytttttttttttttaaatgggaaacttacagggaataagatctgtttcttcatttgctttgcaagagagttggatttgtacacgatgcctgagctggctcggttttctaaagacctaactttgcagcattcttcaagggctccagagagtcccttgtgccatcaaattaagtttggaaacttcaataaaaaagtcccgaaggaaactgtcaattaatgcatttacactgaagcatcatatttgggaaaaacatcttcaaacgcaaacgctgttttccaaccattaaaaagtttatgcgctgcttggtttccatggatacctgaggtaatagcctccttcctctcattgaagagtgaatgttgctcagttacttttttcctgtttttttttcacttttgtcttcctgacttttttcttccatccctatttatgaaaacaaaaagataactaaattgaaacsttgacaatgtaatttgtcagaggaaggcagcctgttttataagctcaggtgatttcatttttgttcacctgtttatttcatgacacttgcaggaaaaagargaattttcatttgatcaaatcatttccatgatccatcaaacacacaagttaaaaagggaaatgctctcagtctttaataacagtcttaatcgtgtgtagagcagagattgacaaactatggcctgccggctaaatctggcccagtgccttttttttwataaataaagttttattggaatacagacacgttcatttgggtagacgttgtcgatggccgctttcacaacaatagcagagttgagtgatcgtgccagacattatatgggccacagagcctaaattacttaatctctggccctttgcagaagtagtttactgacctattatatacaggaaagaatgagggcttgggtggcacttagtagtgttgtcacttttgtcattggccttgacctgactcagtctccgtattgttgagatgggaatgacgggaccctcagtagtgttttgggatataaggcacacggtaaaggaacaacaaataggaattacattccgtcgagattcttttgctagaaagatccaaagaaacctaccttgtgattctagatgttttttaggaaacccaaagaaagtatgaaaaagcccaagccaagtccttccactgttgttcccgggcctgtgtgtgctgtgtgtctttsctgggagaaggtcagagctggagtggggcactcgattccggcaagagaaggcaaacaaaagaagccacaacagtctaggaagaaatctttaatttctattcagctttaaagagtttgagagmgttttttcccctctgttaacaaacgasttcaagtacatgccttcatattataaaagtacctgaaattgcctagaatagcagcatgcatagcttgttagtatttacatatatttacatagggaaacaagagaaagatctacagttatttacagtctacataggggaagagaaaggcagcctaattgtatttcctaaaatacagtagatgagtagtcagcacatgcatatttagataatatttgcatgatagaatgcaaactttraaaaagacatacctttgtaactttctatgctaaggtgttgcataatcaaggttaatttttgtttgtttctagtctatkggcatcaagtgctttaaaatgctcactaacaccgaggcagaattatttacccgggcaattaaagcaacagcacacacgatcatttcctactaactagcaacacgctgctggtgaatgaaatatctattgtttctcattacccatcgaccactgtgaagagatctctctgtgtaaaggcagtgcctaagctatcaccattaattatggaagtaatataaatgagacactctccacagtatgttctaaatgaaatattaacaaggccagcgtcttggaacctgagaaatggtctgttccagtgagctctgtatggaaatccacacacctaactcagacatgcccgatttgaaatagcggggctggacattgggggcctacctgtgagatctgaattattgcaaagtacatcctcttaatttgtttctggaaggcagagttaagagttaattccttcccatgatgtggccccagcggagaccttgtgttttttttttttttttycttcagtgctttttcaggactatgttatagaatacttatggggcatacgtgtaaatgaactgtcaaccttaaaatctaaacaaamagcttgtttgtggttygtcctgaaatcctccctgctcacaaaacagccagctacttggttttctaaaagacgtaattttgcaggcagacttcrtagagccattctgtgcagaasaagggaagggagaagctgtttgttttacctgtagtatgaagatattctttgcgctgttagaactgagctcattaattctgcctggcaataatttcaaaggtttattttggtgtagatggcgaatacagatgcatacatttatacgcagtayacgagctagctataaccataacagaggttaaagaagtagagtaaaaatgtaaaatgtttcaaataaacacacactaaatatcttcttttatatcttataaacacccagcagtcctttagcacgggcatcaaggtggcccagytggaaaatttcagtgacatgccatcagatttgttccatgtagaaggacgacactatcagttagatgcttattttgttggcaaatttctatggcacttctgcttggcyayttcaaaccaaccatggaagaatagataccccaatgcgatgtttcatccctattcataaagaaactgtactttgagcaatgtaggtatcccaggcagcatcagagggaatgcccagggaattcttccatggatataagacatcatcaacaataccttctcttagttctaatgagacagcctctcaggtccggtcagttctagaacgctttgggcaggcacaaatggaagatggaacaagtgtgcatgtaatgacccacatggattgccttgaagccgtttctttttccttccctcgttaggagtaccctcaccctaaccccagcaaagcatgtctagggtctcacaataayagcaggtctcagaaagataaaataattctgaatgttacaactcgtcccatttaaggctagacataaatctatcacagatcctttggaacatcgatggcaagaattctggaacacgaaggaggtatgaaaagggcttcactcgtttcatggaaaagctcagaacagtttgtcgacttggaaacacaggccctgasagygtaccmaggtcaccctgcccttcaatcctgctgatagcccaagttaacatcctcccatgccttggccttcccagaacaaacatggctttggacgcctttgggtggttgggactggctgcctatttttytctaaaacttaagttttaggaaagaattctttccagctttccatcctgaacctgctggtctccaggctcgttcctgcaaatatttcacagaggagtaagagccacattcttgctggctttccarttcattctcctctcttcgagtccacctcttaaaacttcttagtgctcttgcaagaaactcatgtcttttgtcagggagaatggcatggcctttgtatgacacttccttctagccagactcggatttgggggcatcatatttgggatggctgcaccgyaaacaggaaaggccacaggacagytcacaggttctctctgaacagaagcctgtgagcacgtgcctgtcatttaaaagctgcatggcactcttccccctgcatgcgtttctctcaaggtgtcccttgtaatttgtggttgtggtctgtgcttgaacctgttgcatttatggtgatggactggcactttactctctctgagccacggccatcaagcccctgtcatagacactgtcccyagtgtcacctggggaatgacactcttcacctgtcatgggagaggcaactgaaaaggagcctgaggtttttctacctttgtgaacctgttgctagcaaagaaatatttttccttgtggcaaaagatcaacatctaaacacattgtccacgtctaatttgttagggagggcrtgttctcttctggagggctaagagttggcatgggatctaaatggattctccagaacactttctcacacttctaaagcctgaaaacaaatatttgctttcctgatcatcttcattgtttctttttgggaaattgagtgcattcctcttctataataaaggttaagaatagcctgtgagttagcaaaactcccaaaggtttatgaagaaagttacatttcaatacctacaggaagtatttgcatgtgtctaaggctggattgttgaaggcctttgtgggagtcagttgtcaggaatttgtaggaatgactgtgttaggaatcattggaggagagggagtcagagggatggatcagtattttctctgcaaacctgatgaaacactccagagcccgcacctacaygcgtgggaactgataagatgggggttgtgtccacttcacttgtatgggatgtcggtgctttgaaaaaattctatcatcaaagagtaggtttcttagttctgcaaatctggcacctggagatggcattttgaatcggacgacctttttagtaagggtcacttgctgttggatcatcgaagggggtgctgagtcttcatttttgttcatccaaatggatatcatttcaatttagctccatgagtaaatcaatggaaaaaaaaatctccttttaacatttctcgggtgaacacacgacagcccccacatttcattttaggccatgttagggcatcacctcatggccagacatggcctggctgagaaggcggcagagcaggcagagaggcataggaagccggagccccgtggaagacatagatgaggaaatgggccacgtgcaaatatttgtgtcacatatttggggagcaggtttcatgtaccaacggacacggagtctgaagtcactcactctacgtaattatctgtatggctttggacgagttgcttttgatctctgatatcaggtaggcttctctctaaataaatggaaatactaactgtccctggctcatagarctctgtgagggttaggcaacaatgcttacaaagctctccatgcagagmctggcaaatcgtaacctctcaataaatgctagtcattgatgtcacttgaatagtactcgttggctacaactcactgaaaaagccgggcagtttgcagggctgaggactttggagtagacatctctgttctcgtctgctgcttcccatcattttggtggaagttggtgtgttsgttggttagcacttattccaaattgaattgtataatttcattatagaagtatcacggtggaagaagagggtgacttactggtgtggtcacctagccagggaggcctatgagcctcattcctgtataggctgcattactttatgaacaaatgcaatttgtggcaaatgtgtcccctaaaagattgctcttggatagtgagtagggaacaagtggccttttggagcagtttgctttcatttgtgtttccaatgagagattgaagctgtaattgtttgtgaggaatggctgtatcccaagcaccgaggtatctggagatgacctctgcactgttctgggagagtggttatagcctctcctgggggagtgttactgggagacagggaaagacagggcgtgtrgacggccatctattccacctgtgacatgagggctcaccccctcatctccaccgcagcagctctctgataaatgtagctctctgataaatgattctgttcctagtggtgtattcacagagtcagtggataaggtggctggctttgcatttgagaagtatttgctttgtccaacagacaccagatgagtaacaatggaagtaggcagggtttgaagaggtatgtgtctttccttttagccaaacctgctcacttcagatcaccactttgtcctgggacgttagtcatgggaacactgccgtcttcaaaagggctgttctccttccctgctcttggtgttccaagcctaatctaacttccagggttcattcctttcataactctactttttgcataagtggattaattcagcatttgctgtgcaatgtccctgtaagaaagcaatcttagaacatctactctctcacaatcattgaatatatagatatgccatgatattgtgtctattttttatatatctcatagttaagtctactttaagacaggaatctcctctttcttttaaatgagcatgcattttaaaatagaaaaacctgaaagcaaaacacggtgtaacatgtgtccctgtgagtattatattagagtactaaccaatgcattacaaatatcaatatgtgggtgcttttttttttctttaccatatattgtttatcagaaacctctgtaccctttcctttaaaggagtcaatatkcatttgtattctgtgctgacaactataaattgatggctagcagttatcaaatgaatgttgatgaaaagcagctacttaacattttcatcccaacaccgagttttggaaggayggataatttagatctgagggcctcaactataaataaacagcaactgctttctaaatcccacctttctgtagttgaagattgtgctgcaaatctgacagatgatttttgaaagagaatgatgaatccttattaccaagatactcttaatcccaaacaagagtcctgggtaattttacatatactctcaagattgattgcacagttctcctctggcagctcacaaatgtttgactagatcggaaatggcattcgggcatgattaaaaagattctwctgggcttcccagaaattctcagtcctgtgtcgtcaacaacctaactcattgccattgctgcgggatagacacctcccccgtttcccatgattagcaaccatatacaacctacaggcttctgataaatgattgattctcaaaaaaaaaaaaatcgtttaggggaacccatagctccagccagtgtttgtatgtcaaggtattattatttatcacaatggatcagtaagcattgatgacaactggcaaggtattgcttcagatattttataacggagttgttaacattatttcctttagatggctcyttcatcttttctgcattatgaactgatgccccaaaaggtggtatgaatgaaagtcatstgatggtgattaaagtgctctttaaatttttttttttaatcagtttaagaatgctttctcttttattggcagtacctgcttgtttactattgagatttcactaatgtgcctcagtcttattctgatgatatgtaggccgaaaagctggtgagccaaaaatgagaacctgttactaaactgtcatcacatctgatcatattaagatgtcactcagaggttgccattggtacggctgaaaattctccaagagaccaaaggtgtggtgtgtrtgggaccaacaagatattgttactgcttaattgtccagcaagggaggaaagtagagtgagtacccatgagcaccaagcatgaatctgagaaggagaatttgccaaaggtggacgattgatttttggagtagagaaggtcgtctttgctttcgggtgcccctcctgtgtactgtgttctacaaagccagagccacttgtgatggaatttagatggtaaatcaccccaagcctagtggcaaaggaatcaaagccatctcctgataaaaagttaggcttttcaaaaaggtatggctctcagcattgtagccaaatgtaggttggcatgaaatgaagccagttgtaattgcctttagattccgtggaaggaaaaggtaggtccccagctcctgcaacaatggcattctgaatcaatgggactgcagaatttcttagcaaaaataccattccagtaatgcaagagtgcaacgtggtatcattacagtaggtcatagtggcaaaatattttatcaggttaggaagaattctgctttttgctttcccaaacggactgctttggtctttcctcacgcttggcagaacagtgaaaggccagtctgtcatgacgtttgaatgctgaatagtataaccattgtggcatagagggcgggaggctggacttgaaatgggtgagctggattctcccaccactcgggagttaatggcaagtcacttggccactctggtcgttttggcagctgcaaggtaaaatgaaaatatatgacagatatctggaagttgatacaaaacaccatctccaccagaactctaagattccaggccaaaataatacttggcttgagttagctggatgagcatctcaattctccaatttgtctttagaggcacttctgcttcccttttccccacatgggatgcagaagagccagataaaccccttgaagttgtttagataaatgtgccaggtgctaagctcagggttattaggaataataattcagtgaaaggaaatttggatgacatgaactcatttccattakacttgagccacacaaatcaatgggaaaagaaacagytgaatccagsataatatctggctatttggagtgggcatgataatggagggagattggggaggtaacaaaccagctactattaagttcaagtcatgtcagttattcaaattcaggaccagtggaacttgtccagtatcatcaagcagccagttattatcaaaacccaagtctttgtctcactcacggtccacaccccgcccagagtcgtatcacttgactgcatttgaccattcagttttcagaccaactccattgttactagatatcctgacactgaagaagctaaaaccaaacarcaatgacaacaacaaacccaagtctgccttatggcasattcttcacrtcgtaacaccttccttgggaccctatttctcagtatggacctgactctcccagggatcctagaatgcaagcatagtgattgcaaaccagaccatttgagggaaactcctcyagtaagcaccctgcatggtcacaatgtaaaccctgcaggggcagaaaaatgataagctttgggtcgggtcggaaagccatttcccccacaatcaaagttccttagtgttttccttgtgggggcgagcttatcttcagttaccttttccggtcctctcttgcaacccctctccctctcatcagctgaaaattagtggatgcagctagggctctgaaacacataaataatcataagatgccagataaactgtattggttttaaattagagacgtgccgaccatgtctccctctgaacagcagcctattatttttaattatggcttgcaaagcaaagtgatttcttgccctctttatagcatccctgacagtattctgtcagtttggatgatatgatgcctcatcactgcacacgtccctagccacagccscaactgttactcaaaaggtgaatgaaagtgatcagctgcactctttgcaacttacattttgaagtgggctgggaggaaatgtacccccttacctgtggtcccattgtaaatctgggtcaaatatgacatttagaaaaaggttttcatgggatctggatgaattaatgtgttatgtgtttgtgctaagtatgaatgtatggtgaggagtgtgtgtgtgtgtgtgtgtgtgcattaaatgttttaacacaacattgccaacccttcccctagcagcaccgtgggcaaagcataaagggatgatctggcagcagccccacttgggttttctacctgatggaccacaattaagagtggttggtttgtcagacagaaggttctacaaacgatttggtatcgaattacattatacatggagaagtygaggggttggatgaatttgttcttgcacgttcagaaggataccatctttttctctgtgtggaagaggcgcctgccacgacgtattgatatgtgtatttattttccaagcctgtccctgtatgaggtgtcaaaagttacaccagctttacaagcggagtttatgaactcgtttttccaggatagtcacattatactttttacagtcatgtgctttcagcccagtaccctttgctatgccaagatccagctgaaactgaaccaggtgggggaggcctgctaatgcccaggcagtcraaatgacgccatctcatcactccttytcttaaaatttttttttgtctttctycttggatttccagcaacagggagctgccaccaccgtgtactgtgctgctgtcccagaactggagggtctgggagggatgtacttcaacaactgctgccgctgcatgccctcaccagaagctcagagcgaagagacggcccggaccctgtgggcgctcagcgagaggctgatccaagaacggcttggcagccagtcyggctaagtggagctcagagcggatgggcacacacacccgccctgtgtgtgtcccctcacgcaagtgccagggctgggycccttccaaatgtccctccaacacagatccgcaagagtaaaggaaataagagcaktcacaacagagtgaaaaatcttaagtaccaatgggaagcagggaattcctggggtaaagtatcacttttctggggctgggctaggcataggtctctttgctttctggtgstggcctgtttgaaagtaaaaacctgsttggygtgtaggttccgtatctccctggagaagcaccagcaattctctttcttttactgttatagaatagcctgaggtcccctcgtcccatccagctaccaccacgrccaccactgcagccrggggctggccttctcctacttagggaagaaaaagcaagtgttcactgctccttgctgcattgatccaggagataattgtttcattcatcctgaccaagactgagccagcttrgcaactgctggggagacaaatctcagaaccttgtcccagccagtgaggatgacagtgacacccagagggagtagaatacgcagaactaccaggtggcaaagtacttgtcatagactcctttgctaatgctatrcaaaaaattctttagagattataacaaatttttcaaatcattccttagataccttgaaaggcaggaagggaagcgtatatacttaagaatacacaggatattttggggggcagagaataaaacgttagttaatccctttgtctgtcaatcacagtctcagttctcttgctttcacattgtacttaaacctcctgctgtgcctcgcatcctaygcttaataaaagaacatgcttgaatatcatcacctgaagtttgtattgtttctttaaatgtttgtttcagtttgtttttgtttttcattttttagaaaagaaatctagaggaaaaataaagcgcttctaataaagcgcttctcgtagatgccaggaaaacacgattcttgtttcttctctgagtgagtttgtgttttgtttttgtgctttgtggctgtccgtgggccaagttgtctcacgcgattagcatgccagcatattttctgttaaagaaagaaagaaaaaagaaaaatgactattgtttcatttcaccttaagatgttttgttattacttacttacagtgagttattttagtcctcaatggtctgctcccctgcaattagcaagtacttagtgattgattagcgggtatctctatgtttgagaatgggagctgtgcagaagctcttatctgcgcatcccatctcatggacaccatgctttccagcccgttccagcaagcacatgagaaagtccactctggcaagacggagaaaatgcttctgctgaaataccaggaaggtgtggaggctgggtgtcattgttccccctcctgatcatggcagcttcaggccagacaatgtcttgaacttctgtgcctctgcatctgtggtgcagagcagtcgaacaaacaaacaccattgccctccagtggcccatagccttgccacatcctcccatctggctatagtcttccttacgtaatccttattatcacaggacctttgaaactatgaatcagataatgtcacttttcagacattattgtcatttgcaaaagcagccgtcagaactccactctcagaatctacacctggaggggatcacccctcccatatgacctctgactttggccatgtgactggccttggccaatttggaaagtgctttgcactggggcttgcctttccttgttgatctttggaaccctgcaacttccatcatagggaacggctcctgggctagcctgctggatgatgagagacacgtagtcactcccagaaccggcatccagcagttacttagttagacatgtaagtgaggccatcccagactatccagccccagctgtgccaattcagaggagaagaaactgcacatttcactcacagcactgcaaaaagatagtaaaagtttattttaagccactaagtttcaggattacatgttactcagcaaaagctaactgatacagcttctcagctcactaaggttaatttttttctaccctacttctcttataatttggtctccagctacctctctaatctcaacttccagcactttatccactagaagccactctagtcttcctctgttcctcgaacatgccaagcacactcccaactcaaggggtgcatatttgctgtttcctctgctgaaatgctttccttccagaaaccagcatgcctttcttcctcactgatttttagtctctgctcacgttatccctgtcttcatggtgtcaccccattcttattccccttcccctctattttttctccacaacacttaatattattgtacacattatgtgtctattttttctgtctacccactataagaaactccatgaaatttgtctgttttcttcacaacttggccacagtaccttgaactgctcctgtcacacagcaaacttactgacttaataaataaccactgaaagaatgattctgggtgactaggctttatgttcaggaaaataatttccatcattgtgacaatgatcccgagccacacactgtgctaagcaggctacattaccactgtcgcccgggctgcagtgcaatggcatgatctcagctcactgcaacctccacctcccaggttcacgcgattctcctgcctcagcctaccaaatagctgggattacaggtacacaccaccacacctggctaatttttcatattttaagtagagacggggtttcactatgttggccaggctggtcttgaactcctgaccttgtgatctgccctcctcagcctcccaaagtgctgggattacaggtgtgagccactgtgcctggctttttttttttttttttttttttttttgagacagaatctcactctgttgcccagtctagagtgcagtggcgtgattttggctcactgcaacctccctccccggttcaagcgattctcctgccccatccttcagagtagctgggattacaggtgcccacaaccacacctggctaatctttgtattttcagtcgagatgggtttgaccatgttggccaggctggtctcgaactcctgacctcaggtgatccacccacctcagccccccaaagtgctgggattacaggtgtgagctaccatgcttggctattacatctgatttctaatatgactacagtcttgccagttcaccccttctccccattttactgatgaaaaagctgaggccaagaagtgtcaatctgctgttgtccatacagctcataaattgatagagctgcagttcacacccaggagtgtttgatttcaaggtcatgcagattgcctgcaccagtgccactgctccttccataagttgactatatccattctggtaggatgcaccatcttttttccttttaaacagagatggggtcttgctatgttgaccaggctagtctggaactcctggccttaagcaatcctcccattacaggcatgaaccactgtgcctggccatggatgcaccatcttaaaatcttaggctgatcagagaggtgactttatgggtctgactctagttatgcttcaagcatttggtggaaatgaaagtaaagccaggagaaagaagatattggcgtatcatcagccaaggtgctgtgcaaaatgtcaaagagaaccaagagaggacatgctggcctcctgcctcctggccgtgtctagggcctctatgctgacttcctcctctgtggatcctgcagggttcacatctgcaggctgacaagatgaggcctgggggagctttctaagggtagctgaggattctcccaaatcaagatttccaagtcatatagaccaaggcttcatacattcattcatttaacaaacataccaagtgctacatcctggaaattcaaggtttaaagtaaacccctccacagcctctgctataaaggaatttacatcttgggtctgtaggagtcctcacaaagcacaacgtcctactccactttatcagaagttatctaggttacttgaagatgaactgaggccccgtaacagtagcgattgccccctcatgcccatttctccctgaacccactcagtcagacactgtcagtccccatgggccattttctcttgccagacacatcaatcttatttccttggctatttctgtgataaattcttgacaggtgagcaagtgcatggcataattcctattattcctattttagcttattctatggccaaccctatttctccccatttgtcatatgtgcacatctgtatatgtatatgtcatgcacatctgtatatgtatgtcgtgcacgtgtatatgtatatatgtcgtgcacatctgtatatgtatacgtgtcatgtgcacatctatatgtgtatatgtacatgtatgcatgcacaaatatgtgtgccatacatgtaaaacacaggcattatagatgtataacacatatatgtggcacatgtgcatatgcacatatatgtattgcatatatatgtgtatattcacatatatgtatacagatgatccctaactcatgatggtttgacttatgatttttgaactttacgatgatgtaaaagtgatattcagtagaaactgtgcttagagtacccatatgactattgtttcttcctttcagtatagcattcaataaattacatgagacattcaaccctctaataaatcaggctaagtgttaaatggttgtgttaaatgcctttgtccaactctaggtaaacttaagttttctgaacacattaaaggtaggctgggctatgctatgatgttcaatacattaggtgtattaaatgcatttttgacttatattttcaacttactatgggtttagacggtaaccccatagtaagttgaggagcctctgtgtacatatatgtgtgtatttgtagtatatgatttatgtaataatgatcctactctatctgctacttttttttttttttttgagatggagtctcgctctgtcacccaggctggagtgcagcggcacgatctttgctcactgccacagccacctccggggttcaagagattctcctgcctcagcctcctgaatagctggaattacaggcacccgccaccatgcctggctaatttttgtgtttttagtagagatagggttttgccatgttggccaggctggtctcgaactcctgccctaaagtgatccaactgcctcagcctcccagagtgctgggattacaggcatgagccatcgcacccggtgtcatctgctacttctaatttcagatgctatttactgagcatactctgtgccagttgatgggttaggcaaatcactttatgctcataggatgaaagtgagttttagagagaaagtaacctctccacagtctcatagctggtagacagcagagtcaggatgtgaagccagctccatctgccttgaagcccatgggccttccactacacactacttttatgtgtggcctatagactagaagcatatatacattacattcatacaatgggtgaattatctgcaagggaagaccagttgatttcctatttaagaatgagctctggctcttctcctgataccgaaatgtccagtataaaccttacaaatcatttttgtacatgccatttatccagcaatattggcttcagccttgcctacatttctcaataggccctctctcctgttctgactgtaagttggtctgcaccttctcatggactcaacatcccgagttcttcgcgctcatctgatgctacagaatccacccaaacaggaagagtaggccagtttctctgcagtcgttttcttccaagtccctctctctccctaagtttctttcaactccaaaggtggccagtttccactttcacacctgattaagggagaccttgctgcaacttatcaataggaaacaagaaattgaagcattccccagcaatgactgaaggctgtggcttgtggttttgctttttaaaatggggttatgagtggttttgttttgaactccagtgaaggaggcctgatgacgttcatcaaggtcaacactaggccagaaagacttggcttgcaatatcactgcccattctgttcaccagcaggcaccatttttagaagcttatgtaaaaaaaaaaaaaaaaaaaaaaaaaaaaatctaaaatagcaataccctgtctattaactctttgtgtctttcaatatatccaagctagtttagctgaggtcactttagaatactaagtaatatcacaaattattattcatataatcactgaacaaacagctctgagttgtatctatagatgttatgttattgcctttcaaggattcatggtatttggcttcatgccccccctttttttcccttcccccctcaaagtcatcttatttctcaaagttttccattattttaatggctacctcatatatcacataggtgatgggccattatttggaaacccattcccctactgtgggacatttaggttatttctagtttctgttagaactaatggttcaattagcatctttatgcatacagctttttccttctattaattgatctcctcagcatacctttgtagagcgtagaactggagttccttgatccaacagctcctactggcctttgccacagagagccacaatgctatctggaagggttacacaggcagaaccagcatattactgtttgtttacaaccttatcaacacagggtgttcccactgataacattttaaactgattttcacattgtcacaacctgtaactatttatatatggtattcccaagcag
